United States Patent Application Publication US 2022/0211063 A1 - sequence listing, part 6

SEQ ID NO: 8 - DNA, 7752879 bp, Penicillium roqueforti (residues 1-1,938,220 of 7,752,879)
  misc_feature (471)..(2988): n is a, c, g, or t
  misc_feature (125072)..(125245): n is a, c, g, or t
  misc_feature (177030)..(177805): n is a, c, g, or t
  misc_feature (384129)..(384319): n is a, c, g, or t
  misc_feature (555860)..(555885): n is a, c, g, or t
  misc_feature (601274)..(601374): n is a, c, g, or t
  misc_feature (676765)..(677109): n is a, c, g, or t
  misc_feature (719635)..(719834): n is a, c, g, or t
  misc_feature (1142860)..(1143077): n is a, c, g, or t
  misc_feature (1186408)..(1187030): n is a, c, g, or t
  misc_feature (1335891)..(1336062): n is a, c, g, or t
  misc_feature (1623998)..(1624186): n is a, c, g, or t
  misc_feature (1638152)..(1638319): n is a, c, g, or t
  misc_feature (1653332)..(1653453): n is a, c, g, or t
  misc_feature (1825656)..(1825836): n is a, c, g, or t
  misc_feature (2226455)..(2226603): n is a, c, g, or t
  misc_feature (2393442)..(2393608): n is a, c, g, or t
  misc_feature (2448145)..(2448283): n is a, c, g, or t
  misc_feature (2535420)..(2535533): n is a, c, g, or t
  misc_feature (2537093)..(2537315): n is a, c, g, or t
  misc_feature (2854224)..(2854262): n is a, c, g, or t
  misc_feature (2984634)..(2984883): n is a, c, g, or t
  misc_feature (3020936)..(3021095): n is a, c, g, or t
  misc_feature (3033772)..(3034149): n is a, c, g, or t
  misc_feature (3159378)..(3159499): n is a, c, g, or t
  misc_feature (3215603)..(3215868): n is a, c, g, or t
  misc_feature (3224663)..(3224965): n is a, c, g, or t
  misc_feature (3317546)..(3317826): n is a, c, g, or t
  misc_feature (3542230)..(3542405): n is a, c, g, or t
  misc_feature (3623237)..(3671736): n is a, c, g, or t
  misc_feature (3674276)..(3676312): n is a, c, g, or t
  misc_feature (3691086)..(3691320): n is a, c, g, or t
  misc_feature (3731831)..(3732089): n is a, c, g, or t
  misc_feature (3989186)..(3989361): n is a, c, g, or t
  misc_feature (3992145)..(3992256): n is a, c, g, or t
  misc_feature (4101501)..(4101938): n is a, c, g, or t
  misc_feature (4339075)..(4339204): n is a, c, g, or t
  misc_feature (4339582)..(4339886): n is a, c, g, or t
  misc_feature (4384249)..(4384411): n is a, c, g, or t
  misc_feature (4533861)..(4534087): n is a, c, g, or t
  misc_feature (4697184)..(4697354): n is a, c, g, or t
  misc_feature (4793975)..(4796690): n is a, c, g, or t
  misc_feature (4802292)..(4802664): n is a, c, g, or t
  misc_feature (5082703)..(5082846): n is a, c, g, or t
  misc_feature (5096885)..(5097041): n is a, c, g, or t
  misc_feature (5239633)..(5239771): n is a, c, g, or t
  misc_feature (5277986)..(5278170): n is a, c, g, or t
  misc_feature (5381360)..(5381559): n is a, c, g, or t
  misc_feature (5479545)..(5479976): n is a, c, g, or t
  misc_feature (5512536)..(5512732): n is a, c, g, or t
  misc_feature (5631457)..(5631544): n is a, c, g, or t
  misc_feature (5721942)..(5722166): n is a, c, g, or t
  misc_feature (5729059)..(5729204): n is a, c, g, or t
  misc_feature (5774252)..(5774341): n is a, c, g, or t
  misc_feature (5808718)..(5808762): n is a, c, g, or t
  misc_feature (5833194)..(5833311): n is a, c, g, or t
  misc_feature (5846751)..(5846942): n is a, c, g, or t
  misc_feature (5859879)..(5864600): n is a, c, g, or t
  misc_feature (5865581)..(5948580): n is a, c, g, or t
  misc_feature (5949161)..(5949595): n is a, c, g, or t
  misc_feature (6008652)..(6008740): n is a, c, g, or t
  misc_feature (6324675)..(6325396): n is a, c, g, or t
  misc_feature (6373521)..(6373881): n is a, c, g, or t
  misc_feature (6805860)..(6805862): n is a, c, g, or t
  misc_feature (6847293)..(6848308): n is a, c, g, or t
  misc_feature (6999877)..(7000009): n is a, c, g, or t
  misc_feature (7043639)..(7047446): n is a, c, g, or t
  misc_feature (7057193)..(7057698): n is a, c, g, or t
  misc_feature (7108603)..(7109374): n is a, c, g, or t
  misc_feature (7114511)..(7115199): n is a, c, g, or t
  misc_feature (7152289)..(7152484): n is a, c, g, or t
  misc_feature (7347604)..(7347710): n is a, c, g, or t
  misc_feature (7355867)..(7355871): n is a, c, g, or t
  misc_feature (7379349)..(7379623): n is a, c, g, or t
  misc_feature (7441770)..(7441995): n is a, c, g, or t
  misc_feature (7525120)..(7525239): n is a, c, g, or t
  misc_feature (7750736)..(7752649): n is a, c, g, or t
tccctactataagtactcaaaatttcaaagggttaaaatatagttaagaggtagttatggtgcgtacaagaaaattacccttttaggataactgagctcaaaatataggtgaattttaatcgctcgctataggcgcaatctttgtctaaattaaaagtagtaaattggatgcacaaatttaaggtccctactataagtactcaaaatttcaaagggttaaaatacagttaagaggtagttatggtgcgtacaaaatatggccgaattaggttagtgtcattcttcccgtagccctaaacctcaaagatataccttaactttaaccacgaatttcagacgctacactagctggatacgaaagataagatatgatctagaatgcttaagaaaagggctttctagtgatactaaaataatagtaaatactcattattttatatgtacttaggctctatgatttcctatatagannnnnnnnnnnnnnnnnnnnnnnnnnnnnnnnnnnnnnnnnnnnnnnnnnnnnnnnnnnnnnnnnnnnnnnnnnnnnnnnnnnnnnnnnnnnnnnnnnnnnnnnnnnnnnnnnnnnnnnnnnnnnnnnnnnnnnnnnnnnnnnnnnnnnnnnnnnnnnnnnnnnnnnnnnnnnnnnnnnnnnnnnnnnnnnnnnnnnnnnnnnnnnnnnnnnnnnnnnnnnnnnnnnnnnnnnnnnnnnnnnnnnnnnnnnnnnnnnnnnnnnnnnnnnnnnnnnnnnnnnnnnnnnnnnnnnnnnnnnnnnnnnnnnnnnnnnnnnnnnnnnnnnnnnnnnnnnnnnnnnnnnnnnnnnnnnnnnnnnnnnnnnnnnnnnnnnnnnnnnnnnnnnnnnnnnnnnnnnnnnnnnnnnnnnnnnnnnnnnnnnnnnnnnnnnnnnnnnnnnnnnnnnnnnnnnnnnnnnnnnnnnnnnnnnnnnnnnnnnnnnnnnnnnnnnnnnnnnnnnnnnnnnnnnnnnnnnnnnnnnnnnnnnnnnnnnnnnnnnnnnnnnnnnnnnnnnnnnnnnnnnnnnnnnnnnnnnnnnnnnnnnnnnnnnnnnnnnnnnnnnnnnnnnnnnnnnnnnnnnnnnnnnnnnnnnnnnnnnnnnnnnnnnnnnnnnnnnnnnnnnnnnnnnnnnnnnnnnnnnnnnnnnnnnnnnnnnnnnnnnnnnnnnnnnnnnnnnnnnnnnnnnnnnnnnnnnnnnnnnnnnnnnnnnnnnnnnnnnnnnnnnnnnnnnnnnnnnnnnnnnnnnnnnnnnnnnnnnnnnnnnnnnnnnnnnnnnnnnnnnnnnnnnnnnnnnnnnnnnnnnnnnnnnnnnnnnnnnnnnnnnnnnnnnnnnnnnnnnnnnnnnnnnnnnnnnnnnnnnnnnnnnnnnnnnnnnnnnnnnnnnnnnnnnnnnnnnnnnnnnnnnnnnnnnnnnnnnnnnnnnnnnnnnnnnnnnnnnnnnnnnnnnnnnnnnnnnnnnnnnnnnnnnnnnnnnnnnnnnnnnnnnnnnnnnnnnnnnnnnnnnnnnnnnnnnnnnnnnnnnnnnnnnnnnnnnnnnnnnnnnnnnnnnnnnnnnnnnnnnnnnnnnnnnnnnnnnnnnnnnnnnnnnnnnnnnnnnnnnnnnnnnnnnnnnnnnnnnnnnnnnnnnnnnnnnnnnnnnnnnnnnnnnnnnnnnnnnnnnnnnnnnnnnnnnnnnnnnnnnnnnnnnnnnnnnnnnnnnnnnnnnnnnnnnnnnnnnnnnnnnnnnnnnnnnnnnnnnnnnnnnnnnnnnnnnnnnnnnnnnnnnnnnnnnnnnnnnnnnnnnnnnnnnnnnnnnnnnnnnnnnnnnnnnnnnnnnnnnnnnnnnnnnnnnnnnnnnnnnnnnnnnnnnnnnnnnnnnnnnnnnnnnnnnnnnnnnnnnnnnnnnnnnnnnnnnnnnnnnnnnnnnnnnnnnnnnnnnnnnnnnnnnnnnnnnnnnnnnnnnnnnnnnnnnnnnnnnnnnnnnnnnnnnnnnnnnnnnnnnnnnnnnnnnnnnnnnnnnnnnnnnnnnnnnnnnnnnnnnnnnnnnnnnnnnnnnnnnnnnnnnnnnnnnnnnnnnnnnnnnnnnnnnnnnnnnnnnnnnnnnnnnnnnnnnnnnnnnnnnnnnnnnnnnnnnnnnnnnnnnnnnnnnnnnnnnnnnnnnnnnnnnnnnnnnnnnnnnnnnnnnnnnnnnnnnnnnnnnnnnnnnnnnnnnnnnnnnnnnnnnnnnnnnnnnnnnnnnnnnnnnnnnnnnnnnnnnnnnnnnnnnnnnnnnnnnnnnnnnnnnnnnnnnnnnnnnnnnnnnnnnnnnnnnnnnnnnnnnnnnnnnnnnnnnnnnnnnnnnnnnnnnnnnnnnnnnnnnnnnnnnnnnnnnnnnnnnnnnnnnnnnnnnnnnnnnnnnnnnnnnnnnnnnnnnnnnnnnnnnnnnnnnnnnnnnnnnnnnnnnnnnnnnnnnnnnnnnnnnnnnnnnnnnnnnnnnnnnnnnnnnnnnnnnnnnnnnnnnnnnnnnnnnnnnnnnnnnnnnnnnnnnnnnnnnnnnnnnnnnnnnnnnnnnnnnnnnnnnnnnnnnnnnnnnnnnnnnnnnnnnnnnnnnnnnnnnnnnnnnnnnnnnnnnnnnnnnnnnnnnnnnnnnnnnnnnnnnnnnnnnnnnnnnnnnnnnnnnnnnnnnnnnnnnnnnnnnnnnnnnnnnnnnnnnnnnnnnnnnnnnnnnnnnnnnnnnnnnnnnnnnnnnnnnnnnnnnnnnnnnnnnnnnnnnnnnnnnnnnnnnnnnnnnnnnnnnnnnnnnnnnnnnnnnnnnnnnnnnnnnnnnnnnnnnnnnnnnnnnnnnnnnnnnnnnnnnnnnnnnnnnnnnnnnnnnnnnnnnnnnnnnnnnnnnnnnnnnnnnnnnnnnnnnnnnnnnnnnnnnnnnnnnnnnnnnnnnnnnnnnnnnnnnnnnnnnnnnnnnnnnnnnnnnnnnnnnnnnnnnnnnnnnnnnnnnnnnnnnnnnnnnnnnnnnnnnnnnnntagtaaattggatgcacaaatttaaggtccctactataagtactcaaaatttcaaagggttaaaatacagttaagaggtagttatggtgcgtacaaaatatggccgaattaggttagtgtcattcttcccgtagccctaaacctcaaagatataccttaactttaaccacgaatttcagacgctacactagctggatacgaaagataagatatgatctagaatgcttaagaaaagggctttctagtgatactaaaataatagtaaatactcattattttatatgtacttaggctctatgatttcctatatagaggggcctaataggctgaatataatacaaatataccaattcttagcatttatataagtaatatagattttctaaatattaattatatataaaaatggacactaattgtgggaaatcagctagcttttggtataaaattgaattcaataaacctaaaaataagggtttctataattaaaaatgttatacttaaataggaagatatacctacttctactcatatatatctatatactaacgcctactaatcctctaagtactagaatagtattagttgacacggtgagcggggcgctggaaccggctcccattgcaccgcccctctgccgcccccgaccgcctgcctgtctccactatccccttgccccttccggtatggcgccatctcctctagccccgtttaggtttagtgccgtccctggccgctttactgcctctgcctacttgccgtctatctataaaagactgctcgccctctccatctcttgtcgacgcactttctcttctcttttttcccttctgcccccctttctttttttctttctcgcccttaccgtctcctgcgcatttggctttcagcccgacgcactgcccctttcattttaccggagatgccgctcgatccgacgccgtggtcgttcggaccagcgtgggctgcaatgctatccagtcgctcaggaacagaaacactgcggtgatctagccatccatcgcatcgcattattttgtgtcaatacttcattttccaaagaagtctacgaagctatctagatcgctttctgctggtgagaccttcccgttcagtggtctgttattccgctggcatcccttgttgcgaagtctccccaattgccctccttgatgctgcatgctctgcttcatccgccccatcgcggtccccacctgaggttacattgcacagcccttggcgtcgcagatctactctcggccgtaaacgcctcgacccccaatctgtcgtcatcgtcggcctctccggtgtattcgcacccaattgatccatctcggcagcatgccacggtcatgcgagccaatagcaaaaataccgcacattcgcctgaccccggccaaatgcagcgtcgtgaggtcaatgcctggccgggctatgataagacctcacgatagcacagtctggcgaatagaggctttgctagcgacagccgtgggcataggtcattggtcgggagccatcagcgagattggcaggggttgttgcaggtgccctaaagctgaaaaagaaacttgtgtcgtctcacaactttggacgcatcggcatgggttgcaggagatggtcggcgtcttctgcgctatgaagtaggcggattacgcctcgtggtctataaaagagacgacgattcctcccaagtggcaaatctgtaatcccaccttcccaaattctcccacctttccattctcaccgtgccctacccactaccacatacccaaaatcccgatcccgttttctctatttctacgagtggtcccgattccattatatcgtgtacttgctcagcagcctttttcacaatatgtcgagcgatagttttcgcttggaatctttccggccgtggaatcctttccaggacaaagcgcagcctctgcggaattctctcgatatttgtcgttatccaagtcctgtctcgatcactgctacctcgcctccctccaattctagcaactcggcctcgacgaacccaaattttcattttcataaacctgagcgacacccccttcctccccgaccaccagtggaggcttgcttgaatgacagcctaccacaggagataaacactcagcaccaacccgctatgcaggatcagacattatgtgttaaccccggagttcaggcgttcgacttcgaggatattcgccaactgcaggatttaccaagctctggagacgaagaccgtccgatgatctatgataatctaggcgcagagtctcagcacccactcgactttgagtcaggcgatccgggattcgcttgcactaccagtcagcactctcatactggcattactagaagttctgttctgacgagcgagtgttgcgacgcaacaattgatccggcaatcctgggtgattaccatttccgagatattgagcagaccccagcaagaaaagacactgacgttgtggtcccttctcgttcgtcggataaaactgttcgtggccgcagcatgcgaccaaaaatgaaaccaaggcggcagtggtccaaaataaacaaggtttctgtcgtcgtggacaatcgccacgtgaataggactggccggagcactcgagcaaacggccccgttaaaatgtcgttttcaattcttcgggatcaattctcttctctaccggtcgaagagcaactgcagttcttgtcctggctgtttcagggtgctttgtcccaatgcctccatgcttcatccagcgcggatggcgcatcggcattaggttctatctcgggagaggaagaaacctcgactccaccgcctgcgcaaccattcgcaggtgccaacgtggtcgatatacagcatcctggctcctcgagaaaaggactacctttcattccggaagaggatcgccttctggtgaagcttaggaaggaagacgctcttacctggtcggaagtgatcaagcgattcagtcggaagttccctggaaggagcaaaggctccattcaggtgcactggagcacgacgcttaggaaacaactgctgtcttaagctagaaatgcatataggaagttttgtcgatttgctgatacacggtcatgttatttcaagtattgttgtaaaccacccctgtctccatttccaatttccaagtacttctttgcattgcattgcacagctcctaatgttgtagctattccccagcctccttctttcgaacgctgatttatattctgtccttatttttgggcgtgttcgtgcgaaaggtaacagtttcatgtttgttgagctcgaagaaggcataatgaaacgaccgcctttcttaggcctattatggcgatttggaactatgaaacatgtgagtaacttgtgatgttggtttagtgaaggtatgtaccgtcgcaatttgaggctgcaggctggtatgtatgcaggcaagtatcgtcaagcctaacgaaataagaaacaaccctattgagccaatggacgccacccacaaggctcgttgatgcctggcagcagtgaggagcggataatgccagaataatttgaatgtattcgtttcgatatgccatggcctcatgcatattatccaggctctaataacttgggcgtgaatgaacccgagcccagcaaaagcgaagatcataaatgaagaaaacaaagctctgcgatgctcctgtcatttattgattaacaaattatatcaaaaggaaggcagctagttaaacgtaccgaaaaagccatagaaaataatagaatggcaactgttcctacaaacaataaggcagatacgatatgggctaaccagtgttgcaaagtagaaacacttagatactgacagaggtcagtgttgctcttcttctgttttcaccattctcacctcattcaaaatgagcaaaagaagcacactatcaacttccagctgtagcatccgctgagacagatctgaaatgtgattagtgaggaaactgatttcagcatagaaagcaacttgccgtattttggatctgctgccaacagtgccaggaaaacagaagtgattgatcccagaaacacgaaaccacctatcacagcttgactagagatgagtggttccttgctaagcctttgcaagctcatagcgtcaatcgacaggagccagaaggcaagacttgctccgcagaaaattgatgctattatcgacgcagtcagttggaatatcacctcagagtccatttttatgttgacactttcattgagctcgatctacacggtccatgccgctatttaaataaagagccctttacttccctagatctcgctcaatccgacaagggggcgtgcatctgcagctcgttcttcctatgagagacgtccccattatctttccgggttgcgatattgtgatggggaaacgtgaaatagcgatacttcctagtcatagacaatgatcagctgctgaagtcccaaaaatggcccacagccccacctctatcccaccatccattggcgcattggcggtgcacgtcagcaaacttaggcagctataaacttagacatcctctaaaactgtggcccataatactttcaatcttccaactttccaactttcaaaactaaacgtcgacatccatatcacaaaattagccatggctgctatcatcaatcaattaaactccgttgctagagatctggatgccttgaacttagcgatgcgtgatatctctttgtccgggaccgacctgcaaacgttggaaacggtcgctgcaaacctcaaagacatcattgttgtcatcgaagcaaaagcaggactacggaagcgcccatggatggagcaggcgtggaaggacagtgagccttacagactcaaagcgcaatccataattgccacagtgctcagcaaaggacggttgcacaatccagcggtattccgcaggaacatcaagttaatctactgcgggtcacagcaatctgagttcgattccaaagataccaagtggaggagaggtgtggtccagaaaagatgttctaggattcaacaacttagcccagatggaattgtctcgtgggctattgcttatcctccaaccacatggggaccatgctttatgtcaaatgatacttttgactgcctcatagaggatattgagccaagagacaggaagaagtggccggacgcagtatgtcaaacactttccagactgaaggacggggaagttcaggggtgctacagtcttgagcagctcgtgcatagtaagaggacccttggaagaggcttttctgtaactgacactccgttagacctagagaatccatcccagcaagatgaattcactaatcccgatatgcctatccaggcagttcaaacagcgcctcggaaccccgacaacgaacaccgaggtaagacatatcgcctgcgttgccggatatattttgattctttacagagatgaagcacatgttcacaaacgccccaaatacgatggtgatgcaactaccgcaaccattccgtgctgcagttcaaaatagtgcgctgtggaagtgggaaaggtctcagggacacgggacaacagcttgcgtggcaacacttttcccgaaggacgaaacacaggatgtatcattcactatctgggttggtcacaatgatgggtatagactgaatgacacctatggcgtgaagcatgcactttcctcctaaactatccagcagacaatttcaactcccctcacatacgtcgtgtagcccttcggaactgcgaaatttttgtactcggtgacattctcctcgagtatttttcgatcctgcgcgtcttcgttgaatactgatatgtatagtccttgaaatttgattgttctgtcattttccgggtccggaggaaatcgatggctagcaatattccgttcttcgcgcccggcgagggcttcgtcacccttctgaaaagcgtgtcagtcaagaatgaagaataaggatttgatggtgaatcaaactaccatagtgcaactgtagaatatcaagcaagctgatcaacgttgttcaattttggaatggttttatgttttcgatcttccttcctggtgcgacctttcgttctggtatttgaagagagtggggtatgacaacccagattgggcagcaagtcaacggtggccagcgcaatgcatcgcgtatttgtgcgccaataattgttgtagtagtatcccagaaatacccaagttaaggtagctatggcccaaacgtagggttgacaggcttgaatagcagttctgatgatgttcttgggagcaggtcgacgtttggtcctcgcgtaccaagttaagaggatcataagggacccacatcagtcggatcaactcggggtacagataattatgccccgttacaaagccattacataatttttgactcaagtggtagactaccaacttggctacctactacttttacagggtcccgaagctatcttaccactaataacttggctacctaccacttttacagagtcctaaaactatcagtttctaagaacgaggctcgatgtcgtttattcaggtccaaaagcgacgccaccaactgaatgattcctgaatccatccaattgagggtggtattacttcatatgctatgcaccatgaagcacactcccatgcagctgaacaccgaatacgtggggggaagcaacgtcttgctcgaacggtgactagactcagcatccaaccaaccaagcatataaggccccgcgaattcccatgtcctcaaaccttggataacacatcaaaataccgttctctcctcattatcatcacagccacgaataccattcgattctcgtatacacaatgaacgccatcagcgggggtggtgcccagatgtctcttatagatgtcctctttcccggtttcagtatggcctctgcctccgcgcagcagcttcttgctggtaacctggacagctacactcggctcctttgtaccttaggaatgcttgtcctcttcacttgctatgcagtccgctatgttggggagctagtgagaagccacttcagttcgtaattcttcctttgtgatgggatgagtctgacagccaacagcttcgacaatccatgtctcatattatgacgaagcgtacgacatgctagtcgactggatagcccaccaaccgtttgtccgcaatgctcactcagtaattgctcgtgtgagatctccacagcgaacaaccatctaaagccaagaaaagaagaaacctttgacattttcgccttaggatggatcctttcctttttggtataaaggacacctactcatacttcactgcgctgtcaaagaccatcgagaagacatctacatctcctccattggcctttatccaaacattctcaaacagctcgttaaagagtgccgagggaattaccttaataacattaacaaaaagatcactgtctttaagcactgtgaaggggactagaagaaaactaggttgagaccagttcggcccgtcttaacagtcattatagacaaggaagtacaagatgaccttttaagagatatgaaggacttcctgaatgaagatacacagaagtggtacgccgaccgcggtatcccctactaacgaggctaccttttatatagacctcctggaaccagaaaatccagcttcagtctatccctggccggggaatttaaactagatatttatacgctttaactatcagggatttctgacagcaagctgataaagctattttctgagcttccgctgcactgcatcgttcttctagaggacgtggacgccgctaggatagggtgcagggacgactccgatacagaccaagaggataagtcaacctctagagtcaccctatccagtcttctaaatgttcttaatggtatatcatctcaagaaggtcgggtgcttgttatgacgactaatcatatcgaacatctagatgaagcactcattcggcctggccgcgcagacaagaaagtatatttccagcttgccgataagaagatttctactcaactatttcacatggtcttcaagcagacggcagaccacaaggggtcaaagcatgaatgcggcgataaggcgattgagagacttgccaataactttacttccaaggtgccagaccaagttttcagtcccactgaggttttatcgttcctattggagcagaagaactcgccttttagcgctgttactagtgttgaaaactaggtagcgaagacaaaggctaggagccaactgaagagagagggttcctaggtacaagaaggacgttaagaactaggaagagagggcacccgcgcaatagagaggcaaaggggcataacaccgcgacgacatttcgtttatagacaggactgaccaagcctatgtcgccaattggatgttggtttaatatttgaggcgcttcactatttttctggttttttccctgccctttagatactttgaccctgccagtctttttcttggcccatcgatcttagcccatcgatcttaggcccccactctttcagttatttcccatactttcactccttaatttgaacacatttatcaacttcaacctgtattagccagtaggtagcttggagtcctatttggccaatgctcgcgctaagagaagctagatctccgcggaggaacttgatgttaaccacagagccctaatgcattgggcaaggctcaagcgcatattcaagatcgcgaaacaatttgatatggtgctacttttggatgcattcatagagcgtccgattgcctcccatggaagttacaaccgccttgtgactgcctttttttgcgaaaccttgaatactatgaaggtatcccgtcctattcttgaccgccaggctgcagcccgaatcagttcgatatcccttattaccggacgccgacacagcgttgatgtcacctcaagaaggtcgggtgctcctcatgacaacaaatcatatcgaacaccttgacgaagcacttttttgtctaacctaaccctaaccgaataatttcttcctccaggtgttcgatatgatttgttgtcatgatgagcacccgaccttcttgaggtgacactctagcaaacttgtgcaggaacgcataattatcatgtattatgcgataactaagccaataatgtaaacataattcctcccgccccatgatctgacggtatggtcgtcaaccgagtcgactaacgcggtggtctgtggtctgatggtcatcatatgtagggaactgtcgagctagacaagagcttttgcttgctttccccgtgccgacgcgataactacgccaggtattgccagaagttgattcaagaacccgacggcgcttcaataatttcacatcctctaagtcaatgacaattaactggccactgaggtcatcccacaatatattgcgccactcactgtcgttgtggacaactccgtgtgaccggagcacggccagagctttcttgcgctcctggttgaagaaactggaattctcgttattaattatatgctgaagccgcgttcctgactagctcaagaccatcatctcggccattattttaccatggtaccaatacgcgacctgtggctggaaggatccaagacagatggggatatgatgtccttgtaagctcctgaggtgacgataattgtccgcctccgcttaaaggcgatgctgcttctccactatggtagctttaatgaccacagtatatctgtgtgatagaagggtagctttaacgaggtaacccgtccaaccatagacgtggagttgttcaaacctatggtttcggttttaggcaagttgacagtgaagccggcgtgtgaactcatgcggtcccatggggtgtctctgtccactgtggagtttccagttagggcattctttatctagagggtctcggttaaccatgccgcggatgcaggcaattgtgcagtagggtcgtgtagattgcctgtcttttcgagaggtctgtttgttaccccgactggctcgtgtgctttcgctttccttagtcgattgacggttattgcctcggtcgcggctcgacctgctgtgagtcgctgctgcgatagatggcgaatacgattctttatcactgccgctgccttcggtcgacgaatgctttagagtagacatgtctggtttacagcgagtacgggatcgtgtattatgtgtcttcggctctattttccagtgcgagggttgataattggaggctcgagggtctttacggagagtctcggggatttttctcaatacatccaggtattcgacctcctaggtctttagtgtattatatgccacattatgccactcttgagacggagcttcagcggctagcgcttgaagggtgaatgcaagtacctgaccgatagcggtccggtggaggcgcaattcatcgtccgcctgtacgtcctaattcgggatatatataaaatattgaacaactgtgggattatcctccgggatatagagaaaaacaaaagcctccctggtgtagatgtagccgtattagaccccactgtcgatcatatatgagaatatctgagtgaccacagcggcgacgaggtaggtggcataaaacttaaacgtatcgccttcctggttaatgacatcgcgagctggatctatctggtgtagacctgccaccaattcggggattgttaccttgtgcggtgctttgaactctaccgtatatactggtatttgtcgttcatcagccacaaggtgtacgcagaactggtcggcacgacgattacgtcttcgtgcagtgctatccctcctttttccctgtgccccttttcttccccttcctctgccctacccaggcttagtgttcgcgagtcggtggggtgttcgcgtgccctgaagattcatttgctccaagccgttcttcagcgaaatttccgatgggttcacgcggtcgtaaaaggtgacttggccttggattctaaacttatgtcgaaaggcttcatcatctcgcaaggccttgataaccatttcaataaaattatccaccgtgtctcgctcaaaatttcgaagggacgcttccgaataaatcgacctgttctggatattcgtaacgacataatctatttgggtattagaagggaagagagggtgtgaggtaaaggcagccgtgcggtcgaatttcctccagacttgctcctggagctgagggaaattaagccaagggactatgcgcttgggataaagtctgttcactgggttggtcgcatcgccctgagtcgtgagggttgcatccgtctcgactcggatcgcttgcgataaagagttgtgacagcgatcgagaaggcgaaacagtgtattaggctccactcgccgctctgcctcttctcgcgcctttttctcttcttcttcacgacgctctgcctctcctcgcgcctgtctctctttctcttcacggcgctgtgcctcttctcgcgcctgtctctcctcctcaagctgacgtcgtagatcggcgattgtttcttccattgcttgttgaaatcactattcggtaaataatcgaatgatgtaaatcaaagtcaacatggtagggagttcgctgtctggctcgggagagtgacccgtcaaggcggaatgcgtccagatgtttaccaaccagcttactcaccccttggctcgagtcgattcatgcctaaggcacgaaaggcaccaacacgctttggcctttttaatggagcaacaccaggaactaaatacaaatcctcgcagttcgaactcagcaaaaagccactttatacattatatcgaggtcctaaaatttctgcaagttttgagcgcaaaaagtcaggcaccactttttgttactttggctgattcatacctcacggccagggacagtgaagtgcacgtgatgaccaccttatgtatcgccgtggctaacataagccaacaagcaagaagggcatttggatcgtaggcctggggaatatggtataaaggggaacttgtatgcctagccaggtgaaatgccccgaaacgaagcaacggagtgaaagggattacaaccgtggatctgcgtgaaaggctgagttgacgttagaaacacagccaattttcgcgtcgtcagtaccctacagattagaaaaactactgacgaagacagcatctcttctctctactagtctactagtctactagtcattggagaggatttgttgagtggacgcacaaaatcggcactgcacggtagtcggcctctaccagcagacataggcagcaagcatccatgccccgtaatgcgcagaatcggccatgccatttcgcgttatatttcacccggtcggggctagttccaatcaggtcttagactcgggccggtccagctggctgagctatgccccctcccaataccccgcagaagacagtcaaagaacactcgagtcgcccggaagttgaatttcaggaacacagctttcaattcacggaaaaagatggcgtcttactgcccccgatgctaaaaaagctttcctctttttttcagccagacagcagcatattagagactccctcaaccatcacgtttgccatatctgctcatctcctcctgattatgcgacagaagatgaactagatgagcatctacaagatgagcacaatatttatggaaagagatagctcagttgacaaatttcttcgccttgtcagatcttgcattgccacagccacatagacggttctatgatgactcagttttatcttttcccttgatatatctcatttattataaacaaccttcgggtactgtcctcctggcaacattggccgttttctctccctccaaaaacaggaggctggggcctttccgtctgaagtacgcatgcatacgttaggtgaaatctcggactttccatcttcccgcaccgcccggcggtaaggaacatttaacaagacgcggactcgctgcctttgcggtgatatgcttgctctccaccaaagcagtcattgtaggattggcggtcataaagaccgctcagtcagtctaatttgaagccctcgcattcttgagggcatatggtttattttattggcatccccgaatctccacctagtcccactgatccccacctgtaatacacaacgtacctagtatttcaatgtgttttagagatggtcaaaatgtggttagcgtatctcttaatctcgctgatagtgccactagaccaaagtaggcagcaccatgtctgttatccccctcagtcaccgccatttcccgccattattctaccacacaaaaattatggtaattattcaaataactaatattcagtgtaccgtccattagattcaataatagcctgcaccctccgtggcataccctgtgatagaccttactaaggtcgagttgttgccaggcctcctttgcattaactaactaactggttaacaaagtactcggtagttctagtcgtcgcctactgacaggcactcttccagactatatctgtgacggccaagggggtagttgagggatatcatcaaatcaatacaattacttttcaaggagtgattggcagcgagctggggaaccacgcacgaagtaccgcttaaaacaaaaatggggggagtaacactagactactctgtccactcaggctgcctagtcttctcagatcactctgtccattcaagtaccttatcctttcgtgaggatccacaatagttctgttgcccgacttatacatttgttcatgacggaaatctggcggtacaacaatgtacgggtaacctcagtggtattgagctctctaactaacaaaaatgacaaaaccgcgaaaataaacaatctgtgcggaccatgatgactaactgtaacatatacttttgtactgtatcgcttgtaccatcggtcacatgattttctgggtattttaccctgtctcaaccatgtaaactaaccttggcattcgacagttcactccactcctacagacctatatacgtcacgtgacgcaggatccaactctctggggcctatgcagggtacagcacgtcagtcagtcgaagcccataacagtatcagctgatgctggcaaattgggcttaacgttggtcgtgcttgtcatactcgcggcaagccctttttttttccagtgataaaccaatggccgactggaattcatcacgtgttatgacggtgttatgtttgcactgtttgctcttgtcgaacaatacataaagcccgtgaaatcctttgttgcacttcggcggcatcatttttgttcaccgagatggataacgagcttcaatcgatcattgaactaccaactattgccgacattgaggcatcgaccgatgtccttagtatacgaacaaatgccatcaaagtggttcgagtgaaggaacgcttcgcggtcaaaatcgggtattcgatcccgcctttggaagctgagaacatgaaatttgttgcagccaacagcaaggttcctgtaccaaaggttcacgccaacttcatcgacccagagacccagaaaagatatgtcgttatggatttcgtccctggtacagacttgcagaaattactgccatcgctcaccccaactgagaagacgacgatcagccagaggatcagacaggcgatcaatgaactgcgagcaataccatcacctggctactttgggaacttgaatggcacgccttacatcgacggtgttctttcaacccctgataacaacccaatcatttccgggccattcaaggaccagaagcagatgaaccaaggaatactggagagactgggccaaatgcagtctccacactacattcgattgttgaaagaaatggtcaaccgcactctcaagaaccatcgaattgtctttactcatggagatctgcaaccgaagaacataattgtggagcgaaaaggggtctgctgaggatccacaatagttctgttgcacgacttatacatttttcactccaccccaacagatctatatacgtcacgtgacctgaaatccaactcgctggggcctatgcagggtacagcacgtcagtcaaagtccataacagtatcagctgatgctggcaaatttgggcctaacgctggtcgtgcttgtcatactcgcggcaagccctttcttttccagtgataaaccaatggccgactggaattcatcacgtgttatgacggtgttatgtttgcactgtttgctcttgtcgaacaatacataaagcccgtgaaatcctttgttgcacttcggcggcatcatttttgttcaccgagatggataacgagcttcaatcgatcattgaactaccaactattgccgacattgaggcatcgaccgatgtccttagtatacgaacaaatgccatcaaagtggttcgagtgaaggaacgcttcgcggtcaaaatcgggtattcgatcccgcctttggaagctgagaacgtgaaatttgttgcagccaacagcaaggttcctgtgccaaaggttcacgccaacttcatcgacccagagacccagaaaagatatgtggttatggatttcgtccctggtacagacttgcagaaattactgccatcgctcaccccaactgagaagacgacgatcagccagaggatcagacaggcgatcaatgaactgcgagcaataccatcacctggctactttgggaacttgaatggcacgccttacatcgacggtgttctttcaacccctgataacaacccaatcatttccgggccattcaaggaccagaagcagatgaaccaaggaatactggagagactgggccaaatgcagtctccacactacattcgattgttgaaagaaatggtcaaccgcactctcaagaaccatcgaattgtctttactcatggagatctgcaaccgaagaacataattgtggagcgaaaaggggtttgcaacaatggagacgcagacttcaaagttactctgatcgactggaatttgtcaggctggtaccccgaattttgggatttttgcaattcaaccttgtattgtcaaatgaaaccggactggcttgagcttatcccggacatatttgatcagtacccgattgaatacctaatgatgcaagttgtctactcgtcggtcttttactgatggtacattgggaaaatataaaacattagtcttagtcgtcaaaaaggaaagccatagactctgcattttacattttcttgtacgcgaaatcaacctctcggtctcttttcaacaccccaaccagagagaagagatcgtttaaattaatctcactgtgaatctcacgcttatatagtgagaagcatagattcactgggggaacaggaggaaagaacaaaattgagcttgtgacccagagtcgtggtatgttggaaaatacgttcacctgtagagagaacatattttacaagggccctgaggcaccagtgcgcttgctttcggatccagtccgtcagacgttgtaccttgataaatggacttgactgacttacctcattctaccgctttaagatgcccttttcaaatgccaatttctgaacatctcgcaaccagtctccacaacgataaagtggtgtaccaggatacaattgtttgcccccaagcgtcaactgggctcgaggcgcctcgactgctctgcaacactccgtctcgaatctgggcaaatctgtgtgtgcaatggatccaatgattttcttcgtgcctggaacataagacgccgagagctcagggtcaaaggaacctcttgggtcgtatctcataccctggagtaaattcccagtgacatgatagagacgtcctctttcagacatttggggggcggtggggttgatttcaatgtaaatggcttcatggttaggtgcaccaagatattcggccgtgtaaacactgaaagacatatttaaagagttttgaaatgttgtggtaactgaaaaagctattgaggtctgatgagtgggctgttacgctcgtacaagtctctttatatgttgagcagaaacatcaaggacttcatcatggctcagaccattctcgtcaatatgccaagttggtgttgcatgtgtctacgtgcatagaaggtaccgcgcgccaaaatgcacgtttgacgctgattggtgtacaaatgaaatttttgtgcgcaggttgcatttcacggcgagacgcccattacgaaactgctgctaattctcctttatttttattttctattttcgtacaagtcgattagtttcttggctcttgccaactaagtaattgaaggtggttggcgccttcactagatcacggcccgaaaagagcgctaatttcccttgctcattgagtgcctctattaagaaaatcatccggcttgaagtaacaatatttggattttaggcagtgcaggtgttaggtgaaaccgtagagtgaatggaatagactgctctccagtacacattcactgacctaggtgattagtcattcgctatccttaatggatgtgtgtttgatactgatgacgataaagggtgtttgtttgtttcagcacgaggttacatctgcctttcgcgcgcgttacatagaaagaaaacattgaaattcagcaaatttttgatggaaatacaattcaacagaagattggatttcaactttaaaaagccaatcaattttcagcattcattagaaacccaaaacgaagctcccgccaaccatcttcgctataaggatcacggtataaaaacttcttgtcaggctgcgtggctacttttgtaacaggattaaatgaggaggatccttggacagtaaatgcaaaaatattattagagattccaagtatcggtccattgcggagcactgtggtggggtcaaataattgttcacgtgctctattctgttgtgcccaaccccgcctcgtcgctcgtagaaggacaaggatcaactcgattatctcaaccgaaaacaagcagtgaagcagaactttatctgctccctcaatagctcaatagcgttgctagtagctgttcaatgaatggacctatggcctaccttcgaccggctctgaaaaaacctgagcaggacccttgcgaaaaattaagaaactggcttccaaaggcagaattttcagcgaaagatgatacgccatacatgaggttatatcgaaacattccggcagatcttctccagcctttccaaaaggaggtatggaatttcgttattgattttcattcatatcccatacagctgaccttaggctagaatataaaaaccagcttaatacaattcgcgaacggagtatccccgtgggaaccctacagcactctaacagtgatccttttatacgaagacaatgtaaatgtatctcttatcaatcacaacgcaaatatcctactagcgaccggtgacttaatagaatggagtaggttaatagaaatcttgaattcgtatatctatatggtgacctagagcaaagagactatatgatagtctcctctaagagataggttattgtttaggtaagggaatacctattatttaggagaaggatggtatataatagtcaaatgaagtagatagaagcgctgccgtttcttaaggagctgagaagccggaatgcagtaaaataggtatcttagatatagtattaaaagatagaagagaataagaaaatatttctatatctacaaaatccggaggatatattaaatatagatcgcgtgagtctatatattctattagctatcgagatattaactagttaacaatcaataaactatatgagttatcttagtgaatttaggggagcgaatatactgtctaatatccgtggactatatattacagatctagactaataagttgaagtcgatggttatatatcacttactataggaaacccttagggcttagattcctgcttagggaagctctctcctagtctataggagtcagtattatgttaatagatcttattacccggaaggcttacctaatagatttagaataaaataattaggatcttctatagaggttgtctgtagttatactatattaatcgatagaattagattaggagataggctgtctagatttaaattggtcctactgttaatataatatcttttccgcgctttatatagtaagtcacttataggctacgagtcccttttggtttaggattctaccctaaaatcagcttatctatctagggaaaattgatatataggaaagaagagcctttgtctttccagtttatctatagtatctgaaccaaatggatctaggtactattttataaacgattctagagtaatatcaaaattgcagtatagagcattatatatatcggaaaatctagaggctaattgtaagtaaaaagtaataagcgaaacagtttatagatatactagacacttttactaaatatatatttaataatatatagaacagagagatagtttaaatgtaaactcgctaggcttttcttatattaatctttttttaggtagtctgtaaatatagatatcgattgggttactttcgcctagtaccttaataaagtaaaggttggggtaactagatctatatatcagctctatataaacctgattagcaagaagcctaacagtaaaataagatatcactacttctaatatcctaaccgctctctgcttaaagccagttaattacctcagccccctaagccacactataccgaagttcctaaagatagttagctctgctttttgaaatatatcctattatctagtttaccgattttagatctacactaagacaatatataatatgataaagtatacctagtaagaaattctaataggatactatagatttcgcctacttcgcattgccggcgcatttttgtgtaagcgaagtataagccctaagagtttgaatgatatctgagtgccgagaatagatagttaatattagggaattactgtctcttaggcaattttcgttttagaataatgaatctagaatggaaatttaagggagagatatagtactagaccacttttctatataagggatcctattaataaaattttctaaaggtttcttctacgtttcttctgactaagatgaacccgatagcgaaacccctttacgcttggtcgctgaaagggattgagaaacgggaggccagagaagataagataaggtgatttcgcgtggaatttgagattgtacaaggatatacggtgggacgtaaggcgtctattctcttagtatctgccgaaggccataaatctgcctctccaaatcggcaatatagtcggaagtattgctgggttccatctcgcgctcaaggaaagatgaagtacgatgtagaatagatggttcagaccactgggagacagcggggaaagcgagttaacacgaaatctactaacaaagaatgattgggcgtgacaggggtatgggctcctaacccatacccctatcacgcccaatcaattgcggggcagcatctgcccaatatatgagctcacatgcacgtacgctcctcttttcgtgtgccaacttcttcttctggccactatagatacctgtgtcgacaaagccagcatatgtaaggccagagaggcgaaaatggacttaagatacgtggatggggtatgatactagtgcttttaaaggtccatgtatgttcgtgcttgcagtctggtgctaggctgccgctagtagcttacatatgagctttataattgatggcatataaaattcgagaagtattgatatctcttagtggcgagaatattatctgcttgagcctacctaaagtttggtgtatgcttttgagttgtatatctcccctctttacctccctgggcaactcgtatgattctactcatgcataggcggacccgctagacctgaaccaagaaacccagctgatgtttgaagccttctatctctactgacgctttgaacgcaaattattctatactatcagaagctggctgtccaaccgacctcatgtactgcctgtcttctgaatcgctctggtctcttcttccgaactggatacaatccctctggatatcagaaggagaacaaaatagagaatgcctggatcaaactgtccctactgttcccagcctgtatacgagaactgaaccagcggtatataagcttcaaaactcggaagttgtatataacgtcacaaagcctctactagtttgcatttcaaaccaaatagagagactgccacggacacgcactaaatcacttgaaaattatatttgtgggttttcctgtaaactgtaagccttttctattaccttctcacattttacttgctagcaacccgaccctaagccatctctatgaaatttgatgacaacacagactgtgagactattgtgcttcctggcatccctctaggcattgaatttgtcaaaggcaggattacttgtatgggagagaaacacctatcacctgaatggtcaactatgtgtttgaaaaacaataaactggctgtgatcatgttgtcaaacattagtcaaggaccgagtcttcagtaagtactcttctttattcttaggcttgttgaagtaatctaattttcgatagccggacctctagtgactgatcggccagtgtggaaatattcccggcactttcgcggtataatcatatggctaacttttgtggccagatttataagtcccgatataaatttcataaacagaaatatcacgatattctataaattactctctaaattggatgcctattcttcgaatttgagcggatgtggaatggaatggaaacctatagctttagcactggcgtttctgcaaattcttctacccttatgagggacttcactaaagtgattttcctaataaaatgaaatataacttggcagattattgactcttggatagtccctgatccctttccaacgacagtagttactgttattctagggtggggaaaggagtagcagctggccaatgacataagggcccagtataggaaaatgattggctcagcgttactctttaacctaaagcaacaatgccctagttactagctgaacactatatagaaaataatccaatcatcgtaaattaacattcctatcaatacttttggtttagatattacatattttggcaagattggtgccggtaggcgattagtgaggccatcaaataatggccttgcattttactctgttcctagcccctacgaagtacactattccgcaggggcttttgagctttacacagtatcccaggaagccacatacatcagcttgtggaattaaaacgatttctgcaatgtagcagcttgtcaaggctattatggaatgtcaaatatttctaggatgtgagtagagtaggtacccattcaagtatataaagacaaagacctctcccagaaatctccgaaagaaaagcaagcgttagatcaataaaaatggaattccctttttgtggtacgctcttcaaaccactatcgcatcattataaagctaacccaaggacccccagatcctgatatatccttacatatatttagacgaatagggccacacatctatgacgttccagatggtcagaaagagtatacctgctaggcgaggctatattagctaataacctacagactttatcataaaactcgatgcaacgaattgccctatgtacgagcctgtcgataacaaattatggatcctgtgcgccggaagcagcactactatatattttacacttgatcggatatacgaagtccttctggaatctgagacctgtaaccatatttgggatctattcgaaaaatcctttttattttcgatttcccggacgtcgaagatagaagaaatatgcttggctaagccaggtgtctatatagtccctagcggtaagaagcgtgttatgacttgttaagttagagatagaggctgatatgcgatagacttgatgataatgcgcacgaacagataggcctccagaggaggttattcttataaacttatttcgaaaaaattacatagcgattgtcaacgcctctttgcgcttggccgagacggacaagaacttatgctcgctgagatatacgcgggtctatcgattcttggtaaattctcgaggtctatactcctaggaatgattgccatcatgagggactggcttcgaaattaagagttttctattaccgatgagggggtgttgactaggcttgtcttacaattagggcggcctgttaaaacccagggcattgctaatcttgtgaaaacgtgggttgtctaaggcgaatatcgtatgactcaacttttacggaatggagactattgggatgccaagtgcgaaatgttgggttctcactattggtagcaaccgacgggaaccccataggaactcttgaatgctttatgttgaaggacgcccttttaccaccgctctattttctttgatacttcacattagtatatacaattgtatttctcgttaccttttccccccttacctatagaagaataggcggttcgtgaggggctctatcgggtctggtggaggccaatcgggtgatccctcacgaactagagcagctttctatcttctatccgttgattcatgtaacttatatgaattattgttactctacttggccatagagttgtgtctctcaagagagtctatcttagaaacctacgaatatcttatagattagacaatacgtcctagccatatatctatgtataaagctacactaggttgcctttctgtctaaatacgcttgtttttatcatggtcaagtaattgctgttatgctatgtgcctatccgcaccctttatacttacctctattgaatgcagtgcgagagctagctatgtaccctgtcacgagcattccttaagccctaaatagtattcagaaagccgtagctatatgcttgaatggtaagtcgatagtaacggcagtcctagctagtcctgctccgtaaaactatgtgggtattcacctaccgggacattgcggtcaccaaataggcgtggtagtgattaaaccacctttttataatttggcctaactcttaagcatcttatacaccctggtaaactggtggtgttgcaaagctcggtaagatggtttatgactgggcagcgctctattctcctgtggaccacaacatatatagtcatgctgaccattatcggaaggccatataatcctaaaacggtatagctcggaatacataccctatatagacattatatcgtttatggtgcccgaatcggcctgtcgaggccacccgttatatcagttggttaagctaatgaaccaaagtttgcgtaataggcccatttaattagagtaattctatattgatgcctatttcgtaccttttaccttgtacctcgcacctagcctttttggaatgggggtggactataaaggtgatagatagcccacccttttcttaatatacccgataatcctttagcatcgttgctcataagatctgtgactccggcctaagcttccttcagagtgcgtttaagcctgctctgttatctcgctgatcacttgttgcgagtctcacattaggcgcttagacttgtcattgtaagtaccttttttgatcattcccgtccatcagcttaccttgtataatacctagccgaaaccctatatcgcaaaatgagtaatgatcgaattcccgcacacttggataccctcggaagcacttaatatcaatttacaagcctagtagagtgtgatatcgatgaagcaattcggcatagtattgtagcgcttcagactgctattgattctgctctcttagagacccttgggatgcagctagatgctcggtaccagcgaacacaaaatcctaatgatctcaatgcatcagtacggtgttatcagcttgcgactaaaacgacttctgatttcgactatgcagcacgcctagattgtctagtaaaattgctcaatgctcgattctattgcctagcctaaaccctacgttgtaaaacgagtgaggatcagctttccctacgcttagacgccctcgaaagcagttctcaagctcacgatcagcctataaacctgacgggtgatgtcgatgaagcagtttggcttgactttctagcgctttaggccgctgttaatcctgcactcttacagaaccttgggatgcagctggatgctcgataccagtaaacacaaaatcctaatgaactcgatacagcagtacagtgttgttagcttgtgactaaaacgacttcttatgccgactatgtagcgcacttaaatcgtctagtgggagtattcgaatctcgattctaatacctagaccaaagccgacgtcgcgaaacgagcgatgatcagctttccctacgcttaggcgccctagaaagcagttcccatgcttagaatcagcccacaaacccgacgggtgatgttgatgaagcatttcggcttggctttctagctctttgggccgctgttgaccctgcgctcctcgagaaccttgggatgcaactgtatatacgataccatctaatagaagatatcgttgatctcaacttagcgatcgactattcttggcttgcgactaagatgattacttacgaccatcctaactataaaatgtgcctagatcttctggcgggactactcgatgctcgattctaatctacgggatttttgcctgaccttgattgagcgattcaacttacttgtactgcataaattggcaggataaatcaaaacgatttggtatggtactggttcgaactcggggaaaggcttggaagacggtttggctctagaggaactatcgttgatcttaacgatgctatttggtacctttccctagcggttaaagagatcactgaagattctgctttcctcgtcgatctcttagtcgagctcgcttttaattttaatcttcgatacgagatattggcaaagatagaagatctcgaatcggcgatttcgctatattaacgggctctttaagctaccgattatcaagatgaattacggttagattgcctgtgtaacctcggaagcgacctggaagcccgatatagacatatcggagagccctctgatctctacagagcgatcgccctagcttatattgcaatcagtataatggaggctatcagccctaactattatttgcttagggattgcttctatgagctcgggactaagctcggacttctatacgaaaaaataaatacgatagatgaccttaatgaggccattatatggtctcgtaaggcggtgggtgctattggggcacgtattgaggtttttcgccatatcgaacacttgttaacacttcgttataagagaacacactaaaccaaagattctgaagaagcagccaagtgggcagaagaagtagtcaagtgggaagaagcagtttagaaggatgggcctttgttgctagctagttttatgatccctatatggaggcgtgtttttatagatgaatataaataccacgtcggacgttaatttaagtagtaaaggtatatctctttgggctccgttggcgggtgactgcatgacgtctgaaacgctgctttatagattgaagcataccagtagatctgcgatatctcctaatctaaccccgggagtaaggtacgcattgacagggaagccccatactcatggaaacccgcactctgtagatggctatgtccgaactaggcaccattgatgaatataaaaaaggggtaagtttatatatttcggtatcctaggataccgaaatgagatcatatgtcccttggcacgcaagccaggccatacacgggtagtcaatatcggcgtcctagcagggcatcatattaaaacatatactttagcggctaataacctattattgaccaacaaagcaccaggacccttaagcatttacgtaggtaacgctacgccaaaatggctcagtagaagagggaactatagagtttgcgaatgggttagaaagttagtatacgatttgtagggttggccttccattcgtttaggttcgcgagagcttcctcagtgaccgcttcagtactaaaaggtcgccataccttaagcgcaatagattctgtggcgggggattccccctacttttagacatcttatagtaagaacttctcggaaaacttgcctataatcagcaaatggactatagccttattaagggcgggataagattttacggtaggagggttcctatatagggcgtatgcaatcatagtatccagtaggaagcgggaattgtttctatatacctattagttgagaggggatgatactatactaaaagaattctcacatttttttgcctacttctttactataccgaataagaaagctagggctaaagtagtatatacactactactactaatacttactgattttcttcttattatagaaagatttatacagttttcttttcttaactggtattaggcctcttgagttataaagtgtactgataacatttctttttagagtagtctctactgtaccctattgacatttacactcaatttctctaataaaaaaaagaaatagagaatatcgagcaatatgtagctttatattatatatattattcttattatataggtatattaaataggttataagactagtacaattgggcttttaagtagtatttaaggagcttaagttattctaggaagggccgctctagaaaccagagaccttctagatataggagtactgttctaaaaaggtagcgaggttatatgaatgaaggcgttcgccggtatgctagacttccgttagctattataaagttagttaggaatataccgattctagaatattaggttcatttggtttacaatctttaattactatacctggttgctccggctcctctagttactctagctcctctggttgctctagttcctctggttactctagctcctccggttactccggctcctctggttactctggctcctccggttacttaggctcctctaattacttaagggtaaggtagggcctaaggttcctagaggattagtctaattaagatttaatagtaagagaaagcttctacttagagcttgcctaaaaacccctaattaataagggtaagtaggatatatctaaaagcttcttaggctgcgtagataggctattattattaagtagagagatagatttagaaatacgaccttagggattcgaggttaagttaaccgaattcttatctttactcaaaaaccttatagaatcactaaaatcactaataactaagttaatatctaattccctaaagcttttattcgaaattaaataatcattagggttactaccccttatattactaggagtatagtcggcttattactatggttctaataagtattgtttaaataagtatcgtttacttgaggtaatatcgttagagctaattaaattaatagtagtaattttgtccttattgggaatatctttaactattagctagggtctcgataaagattatcggaagtatttaggtattatacctcttaatttaatttcctctagtattacttttattaacctctctaatcgcctaattattagacttattaggttgactaaacgaatatatatcttattctttatatattagatacctaaggtttttaaagatctaggctaagttaaggtatattagtggttattgtctaaatcgatagtagagttataagaagttatatctaagttatttaataagtttatatttaggctatctgggagatacttatcgaaattattaggaaaagattgattataggtatcgatagatatatctagaaaataaaggtaaattaagttaaatcctcgagatattgtatttctaggcttctttaccagataagttttagtcgttcagttagaccaccctatctaataatactataagatagccttaatttaggctactatctagggccgataaagaaaattgtctagagctattatactttaccttataattgattaaacagtctgtattagcttaaatctacttataaaggctaataaccgtttcgataggtaatatcgactaaagtttataagagatatagactatatctagaatctataatagggttaataagcgttaggtcctaagtagagttaggcctacctctttctctaaattttctctaggtaagaagttaaagctcccttattctctatagtgattagcctaaaggaagagtcagatagtataagttctgattaggtagctagcttatattaagagaaaacttgatctaaagtattttaagggtaaaagcttctaaagaggactaaggaattcgatagtaaataataaatagatttcgagagtaaaggaattcgatagtaagtaataaacggatttcgagagcacttagagatcgctaatatactttaggggaggaggggagtaacgctaactgtaaggataaagtaggtactactctttcttagcttacccttagcttaccctctgcttaccttctacttaccctctacttacctcctctgattgtaggatttattatattcgtaaagtcgaaatatataggatagaagggtttgtataatattttataagtggctaagggtataaaaggaactttacaataatctaacaaatttaacctctatagttaaagtaaataactatattctttagtcttattataagttattaaagaaaggaaaaacgatctttataaattaattatataggattagttaaagctgttattatataactagtattatagactaataataaatattaatttatagtataattatagggcgattaaagcgcttagtaagcgcttagtaagtgcttaggaagtaaggcagaaattattcctcccggtagaaaatataaatataccctaggacctggttattagaccttatataagttatatagtactatctggtaggcttagtaggtcttatcatattatttcctaaaatagttatatatattaataaatgtactattaaggcttacttaatatattatgatttaggaccacttaataagcgacctttaactactattataactaggaactactaggtttctactccctactcgttatatataggtaactgttgagcgagataagagcttttatttgctttccctacgctacctcttattatattaaagtaaggaaatagataccctttaagaaatattattatagaaattaggtagattagttgatcctagatatatattaactattatatacgataaacttaataagtattaagtaactaggaagttaacagttcttaagggcagtgttagttcttacagtcctttccctttatatgtatatcgaatatgaagggagttactagctaagtgttttacttattcgaggaaatcatattacttaattatatatatatatataatttattaacgcccagcggctgagccgagagggcaactatcactaaactactagtacatgtatgtgcttaattatagtgtgtgtgtgtgtgtgtgtgtgtgtgtgtaattcatttacactgatccctcgtcgaaataatatatagcctaccgctactatatatatcttcctatatatatatattatataccacttcctaagcgaacttagagcctcgccgaggcctgctgtggcctctatgctatcgttgtgtttatactgcccttatagtgcgcggctttgaaaccgttataatacttcagcaaaatctaagacagcctctactatcttggtttgtgatatactgttaatcttacctcttccttcttctcctagtctatctaatagtatcgatatactattaaaagtatcgctaaccttaatttatagctctttcctcagttctcttaattataggtaatctaataatacgtagtaaacgctttcccgtttactacagatatatatatcgttatctcgaaattagaaagtctttatatatattaataaccagtagtgtctagtttataactgtatgaataagtacgcttaatttctaggtagggagccgtagagctatttagtatacttggctggtagtatattatcgatctaatatagatatataccggtgcttaagccgttctattcgttcttctattaggtatagatcccttgcctaatatatactctcttacgtaatagcaaatagtaaaacgggtgagttttacccggtacagctgtctctttagctagtaaatcggtagcgttattccctagtacttcgcagtatctgggtatctactgtagttatatcgatatactataggtcttagtattcttagctacttgtagaatggtatagataatctattatcctaacttattcctaggattctagattacttatagggctaacttgctattactaaggatagtagtagatcctacctataagtaggatattctctagtattagagagcgaccttattaataatattaatagtatataggaccctaattagcttagcggtatatactaactaccgatctataggtctaacctatacttatatactatcgattatttctagtaagttatttagtatagctactgcagtacctagatagccttctcttcctaaggtatccgagtacactataatgtccgcggttaactataccgccttagccctttctattataatctccctatctaatttaatcttaatttctaagaaggcttcttttcgctaaggtagtagtagggttagattaatcatttcgatttcctatagtctctctaagtttatggtttttaaggcttctgatagtaggaactaggcaaataatctataattgttatatcttctctaggtttaattcagggcgttctatataggatgtttttagggtagggtatatagtctagtgatagtattctatatacagtagtgtagacaaaggtgcgttagtagtatatatacctctatattaagtatagttattactactattcgaaatatagatagaacgtagataagcgccgctcattatatagtacagaggtattatagataggtcttatcttaaagcggattatactagacagtcgatatatagtcgataactagtataacgtacactttataaagctattatatttactctagacagagttattataagcccctaagcgcgatattaaccttagtagcttgtttaacggcttattgtatatattccttctactgtaacttatagtcgaagattatacctaggaatttagtagttatagatagtttaatagtattactatttataataagctggccctagctctattctttcctcttacgagtaatataaataagttcggttttctctatagtaaagtaagacctagtttactaggcctaggcttcgatctagggtatatctttagactagattttagctaggttctcttcagcgctctagctaactcgctaatagaagtagttatcgataaaggcagataccctactataaaaatcgactagctagtcgactaggtcgcagttaaagaatataaagaggataggtaagagtagagagccttatataagcctagctttatctagcgatactaccttagtctagtagttattgaacctaatacttacctagcgcccacttataaagcttataatctacttctaggctactaataggatacccttagactagaggcggatatctaggcttatcttatttaccctattaaaggctccctttaggttaaaggctactagtaagataaccttctgtctatattatacccggtcgattgtattagtaagtattaggagggcttactcggttatttgtcctagacgtcctctaaactaagtatctagtagaagactgtagtactccgcgaagaaggatagccactgggctattactacttctaataacttactaagtatattaagtagcgagattaggtagtaagctctaggtagtaagtagtctactttcctaggcttctgtaagactatgattcgtatacttctctatcgctataaatagtatcctagttcaatcgataatgtaaaaatccttataataatatttctaagatatttctagagatatttctagattaatataggtagactatccttacctagtactattatacctttagtagccctaagagatcgatagattttaatcttagagattggatgctattggatcttagttagggtataggcaggtacttcctcttatatagacgctatagataggaaaaacgagtctataaatacctaagctttctctatattattaactagctctatatcgctaaccttaagggcaggaatatagccttaggaatcttatggttttatataaatcgctgccttctataatttcccttctcctactttatctaggaactgtttctaataggatatcttagccttcttaatagtctgagtctatacctactgtgcctagtatatatcttcgaatatagctatagtgtgggtattagcttatctaatcttagcgcagctctcttactacttatattgtaggcagtttatatctttctattaggctttaaggttggtagtaaactactgtttagagtatagggaaggtcttatatcgggtatatacttattgactatattcgctattatacttataagtctctctataactgtatctagcgcctcggctaagtctagctccctaggttactcgaaaagttcctagatctcctttctaatcttctcctagtctacttagtcgtatacctttcttattttactagtagggttatattatacttagaggtactattctgaataagtaccttagtaatctaaattatagttattgtaatagagatagtatttaaagagtaggtctaatctatttattactatctagttaattatagaacttctccctaggtagcttaacgactagaaggttgtagttccctaagggaggtagctctaaaggctataattataaaagaaattgattagttccctagtatccttaataaattgaggttaaatatggttacttccctatactaggtagtagcgattaaaatctccggctaaaataaggctaaaggttctactattatcttatataatattttaaatagtattgtagattaccgataaggtcacctctgccgatactctattaggtatatatatcggtataggcagaatatagactaagaagattaggatttaggagtcggctatctagactttaatcgctattagatctgggtaattgtatcttacttattagtaagaggaggttaagagtttgcaattaatatagataaggctttagtatcgaactgaatcgctttctactataggttaatagagtcgctatacgctatagtttatatatattcggtaggcagtgattgacagttcttagataaggagtatatctagtttctagctctaatagttattaataagagcttctatacctaccctcgattttatagtatttagttatagaattctaaggttattatctaatattataataggggtaccgtggctagtatcgggtatagtaagtctctagtcggatattccccgctatattccaagtagtgcactctaatacctaggggatatctttctcgcttatattagccgctatagtggctatattagggtatctctttatataaccatactagatagctgaatccttggtatcggaagtatcgtttctttttaatcttatacttttccactcttctaatatactgttaatcaattaataggctattatctagtatctattctactacctctagtaagtcgaattagatacctattaaggcaaatgttcctagttctttatctcttttctttagctaagctatatctttaatttgaaatctacggtcggtaagatcgttcttatttacaatctttttaatagctttggttttcctatttttgaggtctaacctaaaggttaggatatagtaaacggcgactccgaaatgtagctttactagtctaatatcgttacctagctcggttagctactcagtattagtatgggccgtttcggccgatacttggtttttaaatcggatcatatatctagttttggtagtactaatccctataacctatgcgtcctaagtagatagtgtcttcgacagtgccgtcctaatataggcgttcgtagctgggatagggaggtagtagccgaacgtgtctctgttattatctatacctaacgctttagtaatagatcgctaggtactgatttggatacagttcttatctttattagtttatcgctaggtctcctagggttgcggattatccgtactggctgtaacggccgcctataattgtattagggttagagtgttcctctcctttacctacgactatagcgctataatctcttcctatagcttcttattctgagtttagagctcgttctagttatctttcacttcttttagttcggtcccggtagcgcgaataagtgtggtttgctcctcaatggtgtattgcaggtatacgataatctgctaaatctctctagttatcacttgtccagtgctggttccggtattagtcagttccacgggttctggggccgcgtgggtctgctcgctttccactcgtgtatgtctcctggtccggaccgtggtcgttagtataaggttttctgttacgacgatccctgtgcctcttcgcgtggttgtggtggcaaggggctcgggagcccccgtgggtgggtccgccattcgtctggcgttagctcccgctcggcacacaacacaataatttatatcgcaatagtatcaaccacaacgtccgcgcaatagtcaaggtctctcccagctctcgaacgttacagtccgccaatttacagtggaattcgaaatcagttttaactctaaactcttacgatttaattcccggaccctaagtggagacacgctaatctaattttagctcttcccctgttaatccatgtagggctgtattgtattcactggtaaccacaatgagtcattgttatagtaccgtaatttcttgtagaaatcgatggaatccatcgtgcaaacagatcaaacaaaagagaatccgaacaatctggcaagatcttctttcattctctcatgtcttgcttgggccatttgtcacgcgcagccttcgcccacactcttttgcatcaaaaagaaggctctagtgactccatagagaacttatcctggtacgcaacttgtttctctatagctctggcctctgctatccactgcgattctcattcgttaccaagtcctaaggaaatccggtactcgggaagctgacatggaccctcccagaactgccatcgtactgtagagatgacacagagcccatatcatgacgatttcatcccccatcccgaagatcctgtaacatgggaaaacaactcacagtacgctccaatacctggatattgcggtagtcccaatgcaacacggttcaactacagtccctccccctctgttgtgctagaagatcagtcactatcagatattcttaggctgctctagttgtctgaatgggaagaaggaagagtatacgacaaggacccgccgacctatatacactaccgtatagagtggcgtgttacagtcaacaatcgagaggtgtcaatggacacggaggaagatcttgttttggcccctagtgccttttggcagctgttcttagagaagaaattagagaaagttcttcgacgaaaaattgcccgtcatcgtccggtgagagctgatgacactgcgattgtcgttttagtgactgaccgaacccaacgcaattcgactaaacgattttgatgctgataccatttgtacccccatcgagtagcagttttcggtgtggtcaggtttatttctccttgtgtaaattacccacactgaagattagtgttaattacgtagacgatcgtcactatcctccagccgttggtcgaatggagagaaaagagaaaaatcctctgtcgcagagaaaatgctcgaagagagagccgctcagcttaatgctgagtaggatgcttctggagaaagacttatataacgcagcgtctataacctgatgcggtgcgtatcctcgacttgcccattaggcccatattgttgttgggtggatccactgggaaaaaggcattaccaactaaagactcgtcatagcgagcggctcgttacccgcgtcgaaaaaggtggggtgttaggcggatacaaagatttgccagaaacagtatgcgaagaatcataaacggaagagcaacagagacaggaaaagaacaatcgcaaaggaggacatgtgactggaaatggagcaccgtatcctaccatcaacatcaatatcttaccctcgcagtcttccacctctgcggctgcataggtttctgctgacttccagtccatgcaatatccaggcccgcttgagatccctggacctagggatgaaatatccaaggaatatagcgaatgtcaagtgtcaaatgtcattgatgacactctcaaggctgcatttcaagatatctgtgacatgatgatcgacaatggtcctgaacttgagcaggtctacaaggatcaagaccaagaactctttattggaagaagcataaagatactatacttccagaaatcggtgtcactatctacactgtttcatcatttctccctgacgccaagatgcgcagggctatatttgagggactactggaatattgatattcaaatatgtatgaatactatttgctacgatcgtgtttttcacagcagcttcttgtaagaagtataaggaatctgtgcctacttctcaatacaactccggatactgcagttgctcatacattagaaacaggccacaaagtaatgatttgtatttagcactatttagtagaactcttaggctgtcggcggttatcgcgtacgtaaaccacagtaggtaaaccacttcgagagcaccgtcggctggtttcaaaaatagatgaagctgcgactaaatcactgagcttgtggtacccatatgtgcgagagtcaaagtcaggatatttgtttgtgaggagttgaccgacatcagaaagcttagcccatccatcgtcatcgcaggatgcttctaccgttgtccgcaactggtctgcgaagtgtttatcttcgggagcttgtttagttgctgatgaattctcaggtgcgatcacactatcagcatgaggtagaagctcatcaagatgtacgaggttttcagtgtagataaatttatcgcaagcagcaacgaaaggcttaggcgtcctctgctcgccgagtccgtacacgatgagtccggactcacgaatacgagcagctagccgggtaaagtcactatcgcttgagacaagacagaacccatcatatcggccagagtataaaagatccatcgcatcaatgatcatagctgagtcagtcgcattcttgccgtgggtatacgcgaactgctgtattggttgaatcgattgttcaaggagcttgtccttccaacccttcagagctgggctgctccagtctccataagctcttttagcatgagctgtaccatatttcgcaatttcggagagaaggtcactaagaagagaagaccgcgcgttgtccgcatcaattaggactgcgagtttggtgtcaccaatcattacggtgaaagtgtatggaataagatagtgacttcacagctacaaaatagatactttatcttcctgttgccatcacgtggataaatttattagttttgttcttataaacaaaagtcatgacgacgtatatacgttattgattattaagagtgtaagggttccacagtttggggcaagtatagcgatgagtgtttcatgcgagataacatggatttaagtatcgctggtcgcggtgaaattgtaatacttgcataggggacacaccaaatggtgaccagcctatgcgcctgaactcaacccttttaccacatccggagtcatctacgtaaaccagctgatacgattgaaaatccgataaatcatgcagataccattctcgtaaattggcatttcgctccctcgcttactgccgagtgcactttgtagaccaacctttggcaacaagggctcgtctgatgctagaggttgtgactagggtgcggaattcatcctagagggaaacagccatctcatcgaggtatatatcaaccgggcttttcagataggtgttcgcagagggcttcgatcattatactgttccgtattctgtcctgcttctaatacgatgacataactagttatgtaccgtgctttgtctgaaagcatggacgtgacagggcagtgccacctgatcccacctttataataaagaccgagaaagccgtgtaatatggttactgtaactggtaattctgtagatagtcgtactaccactcctaagggagtctcgtttcaaggagcgattgacagggaagtcacgcactaagtaccgcttgaaaacatatcctggggagcagaaaggcgaggggttctggcttagcggaaggtacttaccgggtaatattcggccgatccgagactgagtattggactctatacttacgatagttgtgcctgcagacttgtaagcttagtgcagcttcgctttaacactataccttatttgtaagggccgaggtagttgagcgactgctgccacggcctaccgttgattctcagttaattaataatagtctcttaattagattaaatgaactggtctataagatatcaaggcctacctaattgtaagttcaacaaatgttagtggaaaaacagaggtggtgatactgtagcaattaaaattcaagtgtataaaataagggccgtccgttgaaagtggtaagaatattgtttagatactgtcccctctaaaaaagaaattgggttgattgaataggattggttaaacaatatcaccctctctacctagatataaggtctgtgcattttcctaatcccgcaaaacgacaactatgtcgagtggaggcaggagatgcaaaacgtcttcggttttcgtgataaggaaatctattttctacctgttaaattagcgattttatgactcaaattcccatggtcacctatatattccaaggcgaagtgcgctccttattcatgtgcatcaacaccacccaacttattatgtgagccggaccctcgaacttgaggctttttccgatgataacaccattatgaaagccatcgtaaaggttcatttaatttcaatacctagctaagactgtcgtgtactaaccgaaaatattgcgataagcgcccaaccgctcgactaccttgaggaacgagattatccacatgactttcccagttatgctgttagacatacattccatcagcaggcctctctctgccaaactcattcgaaaatttcttatttgattcggcggctaacttcaagtatttgtagttcacctggttgacgtcagcctcagcgagagcgtgtgcaattgcagcgacgtttttgatctagttcatgattggtcagtaatgagatatatagtgccactcgaacacctacctctcgtccattcagatctaaagactccaatcgtcggagttcgtggtcctcaacaatggcagggccttgcatcgtacatgccttggacagaaaagttgaccagagttctctgcgaaactctcttgttaaattctcatactcaatgatcaaatggatccggctgagaattgcgtcatcaaactggataccccgatttgaagtcaagaaaagaattccttgataatattccagcttccggaggaaaatggtcacaaggcgattgtgggtatcgtggtaagatgtacgctgctccatgaacgcgtctgcttcgtccaagagaagcacggcattaaagtgtttggcgatcttgaatactgtttcaagctattgctcaagcgcattggaatccccgtggttgacaacaagttcgcctacagatatctggaaaaatcagtgacgccaaaatcagccgagctggatggttcataccgaatagagggggagcttgaaatactccgaggtcgcctcaaccgtgaaagtctttccgactcccggtgggccactagcacaagttaggtggggaagacttaatagcatagacgctttgccgacatacttcagaagaatgttgaacccttggccctttccatcaattacgtcgtcgaacggtaccgtcgggatcatccctaggcgggttttcgccaatgacaagaggatggtcttggtctctgaagggatcttcaggcagtcgaacgactcaggtgaccagtccacgtctctaagagcactgactgcgcactccactggaatcacattagccagacaccaaaacattgtcagccatgtcacatacagaacattttgtccttaaaactgaaacagcatagtattgggcaggagaccagtaaatccgcctcgctcagcttttgtgcatccacaccgtctcctcgcattttctccttctctcgctcacggtcctccataagcattgcaccaatgtcaatgactgaaattccatccttatctttgaccccaatgtcgcggagtgacggtcgggagtaatttggctgcatttcatggaaaaatgcggcgtctactcccactcgactgttgatattgaccttgaaagccttgcccttgttcataaagaatgcgctgccttcgcagtgtcgaacatgtgagccggccaaattccggaacttttgacccctctcgaccaaatctttccggacttgctcgtgacttggatggtggcagagagggaaggcctcaaggctctcgatcggctttgatcctcagaacttggccactcgcagaaagataccggcctcgccgaacttgaatccattataatcaagaaatcggcactcgagattcaaccacgtctcgtcattttgtgtcatctcttcgcccgcgtcgaatacggcacatcgtggctcttttgtgccaatgcatgtggtataaacatggcaaccaggcttgaaaagcgcccaaagaaggtcatatgtaatatgaccgtgctacaacattgattcgagacgctgcaaagtagaagcgtatgcgtgcttgaggtagttgataagcaagaggagatgctccgcatatgccgactcatggtctgaactgctatccatgttttccgcacatctgtcgagctctgggaggaaatgaaaaaggaaattttgctcgatctaaatccacgtcagcgtgcttcttgatgataatactgtcttatttaccgatggcttgatctccatcaggctaacggccttaatgtcgtgcagcacgtctcgcaggctatcgcgtaggccttccgacttgatgtctatgaatgacactatctccttagaagtccggtctgatcatactattagtaggttttcggtccagtatgcaaaggtcttacgtaccaacacgttcacggacaacgaatgcatactcagcgtagtcgtccaggtcattgctagtctccgttggctcgacaatcttgtatttacatgcttctttgtcccagctagacccgtgtcagctatctgaaaagtggaaggggtggttggctggtggctcatacgtttccataactgttttgaattgggattttgatgcccatttctcaaacgacttgaaatcatccggtgtggtacaaatcggactttcgagatcaatctcgtctaccgcctgagcattcccttccctctcattgctggcagaagaagaccgagcaggcttagttgccaaggagagttcagctgacgcatattcatcgtgggtgagcttgaccatcaaccgcttcagtcgacctatgtcaaggcctggtggggattggtcctgggagacaggagtgtttggaggttcttggtccgcaagatcgagcagcgcgctctcaagaaacacaccaaagagaagcatcaggtctttcaaggtggcaggaggcatagtcgactccttcgttgggctacctggtggcgtcaagccttggggacagggagaggaagatgcctttgcagtcttctgtgccaatgccatgtttgtgcggttggacgactgagaaatattggtgcagtatggggagctggtatgagtagaccaaatattggaatgccaatgatgaatggaaaggtcaacagaagcctgagaaattgctccttcttatatgttcgtccctagtcgtccatgccggtgtcttgtctttcttgtatacagatcggcgcaacagactaagtgaacttgcatgcatgtccaggggagttgattgtgcttgcggcaagctaatccaactgatttgacgtcgtcagctagagccaatgacggtcaaccccgtctatatgcacatcacagggaaagattgatgtgattcgtcctcgtctgctagctcaggtgtggtcaggtctgtccacttcaatatcactgaggggtgagaagcatattgttgggcaatatcactccactacggcagtgaaagcatgaaatgatggactgcgaaacaaagtgaaacataaacgggactaaataacacaaaatgagccatcttgtcatctgaagcaccaaaatgagactctatgagacagtgatgacatgacgtaaagaagacaaaagttggtgcaaatagtgtctactaattgttagtggggacaaaatgggacaaaatgggacaaaatgggattaagcaaaatgttcctcgtcaaattattgcggtgtacggcatcacctagtttttcattatcggcattgtctgcggtatttgactacgtcatatagaaggaggtaggtgggaaaagaagtttgaaataaaaattatatgtctttcttgaccttattgcaaatatgaaggactggtgaggatgacatgcttcttgcatccattctcgggtgacgcgaaatcacatgacttgtatttgctacccaaagggagttgggagagccctgcggtgggctcctctttattttgtagtctgtttcatcacagatccttgagtgcaccggtcttcaacaaattctactcagaaggcaatatttaaaggcaagtataccatgccactgctggttctcgagttgatcactctgaaactcgctgacgcgctcgccgagaattaggtgacacgctccaatcaacctttcccacaccctaaaccaccaacgacgaccagccgaacgtcgggattatcatgaacaaaatcaatgaatctgtatttcaaaagccaagggcacaagatgataaaggcctggaagaggaagcgaaatccttgttggttagaatcctggacgttttgcgtttttcaactgcttacctttatctttgtagaatgggaagtccgtggtccttgaaacagagtatttcaacgggaaatttctagattcaagtatcgcccctgcggtcctgatacacggagacgagggagagggcgtcatccactcgcgcgttgccgagggcagcattgatatactttcaacaggccccaaaacagggagtggccagagaattcttgttctgagcgatggacgtactggcctcatgttcagaaacgtattactacgacgtttcctttctggaaacgcctgatgtctggagcatccaaagatactgaatgaaggaataactgaattccctcgatacctcgatgttaacgtttaacccgggaggcagttgaagatcgacatggatatatggaggtgtcaaattgagaagagagtatgagagctgcaggttaggcccgctaattcgaagcagctcactgacagcttgtagatgagggaaatcggcgtggtacgcatggatgaagcccatgagctgtgaagagaggaaaaatattggctcttcgtcggtcatatttactgtaaaagttccgatggaacctttgccatattagcatgttcatgaaatcatagtcatatataaacaaacctgatccctcagaaactggtagctgcgcgctgaggccgctctcagtcctatcattatctgcaatccatccgtcagcacaattccaataaagcgaagaatggagggacactaccaaattctgagagggcattttgaaattcggtggactggtcaatttggctcctttgcggtgttggctctgcaggagagacggcgtattccaccctcttctgtttgacaccccgagacttcctaaaagttctgctttttgttctctcttttgaaaaaaaaaattagtacaatgcattcagcaagtggaagaaatgctatacgttgtacatggacaagacctcctctctctctttcgtggtccagctcgtgaatgagctcaatcgttcgtgattcgaacttttgggagggtgcattgtcctgccaccaatttgcaagacgaggaaatatttccctatggtccaatgatgccagatcagtgatggatattgtgacagtaacaaggacaaacagcggcttcgctatcgagtagatgttcttgaggtgttgtcgcgccttgtcatgtctgttctgggactgccgcgataccgagagtttgattatgttatgcaaaagacaataagacgattctagtcctctctggctgttcgcatctaggaatgggctactgtcaaggatgcctttttggtggagaagagagtcgaagaaatgctcagtcaatgacatggtgtcgccagctagtgaagcacttcaggttgaagaaacaagtcaaaatacagaagcaatgggacaaattgggcgagaacctcctcctaatgtcttatcctgagctttgacctcccactaaccctcctagtctaatactggatgtgacgtggttgcagcttgctgcataagcggcacaaatttatggtcagtcgcccggtcattgcaccaaccatagcctagggaaagacagggaagcgattcctgtgagtcgctttcacctcacacgccctgccttatttctaaatatagtatatcttctgccgcctactttgccttttagcgtccattactgcccattactgctcattactacttactactgaccattattgcgtgctattgacttgcacagcctacgtcgatacataatgttcccccatttctgtacactgctgctcaccactaactaaaattgcctacctgtgtgcaattctgcacgcgactgaccattctctcctaccactgtccactgttggccgcttctctactctcaaccctcattgctcaatatattcccggatgtgcctctcgtccaatagccagccttcttaccacagacgttcctgtctacagatagtgcgtagcaatgctcatcaactcttgaaagtgcagtcctaacggtctcacatcatgcgaggctcatgattataaaagggactcttcttccttaaaatttctgatctgatacacagcaagcttctgacacagatcaaacctcttctccttacctgataaacacaaagcttctaacacggacaaggcctctgccgtaaggtatttgttctcccaggtcttttagaaagagaataaccaaccagaacagatcacgtcaacatgtgcaagagaaactacaacatagcgatgcgtgcttgccgtcataaggttgagacgcccggcagtctgattcccgatgatggatgtaacaattgtggggtagagacaggcagaaacgataacattgccagttctacctcgcattttccttgcgatgactgcaaggctaatggcctttgggcccagacagccgatggaaaatggtacgaggttgcaacaggtgggcctcagaaatttacagctgatttcaggtttccctgtcagttctcctcgtagtactcattttcacgtaatctgacgaccccttctagaattccttggcaactttaactgttcgtggatattgcacggcgaagttcgacaatttattacctgtgaaggactgatgagctaccccatcctaagtcggataatacggcagtcattctttctgcttattcttgtgctgttgtcgagtttgttgttgttttggaaggtctgccagatctatttattagtggaccaaagggcggtccgaagagcaacccgcacgaatttttgatttaggtattaactcgtatttatgatccgtaattatcatcttttttttttctgttgtgcacttttactatagagaattgattctcccctatagaggaacggccctagttaatgagagaagggctcattctgacgaatatggcatggcgagggagtatttagtcgagcctttatttgtaagacaatatcccaaggtttctccctttttcccttctctccactcttgctgtccttccctcacaacacctgtaccaaactattttgccaccacccaaacagttattacttctgtacatttttgccaaaactctgcacggctaatactacgactacatgtgttttgattcgccatgggcttccactacgcggatgctctcgaggaacatagctgggttggcggaggactcgacgcttatatctaccacgtcactccaactattgtggtgaaaactgttcgtcgcgaccgaacccctgaagaaaaggcagcggggcatcccttcctcaaggagatcgcgttttacaaacgtcttaatgagtgccaggatcgatgtccgaatattattgaatgttttctcatgctcccggactatctttttctatcatattgcacgcataaggcaatcgcccctcgcttctatgaacgccaggagcgagagacaggaacaaatggttttcatgggcgtcttattagagtcaaggaatacgaggatcctgctctcatcgctcggtggatacaacaactcacctctgctcttgagtatgtagagaaaatgggcttttgtcacaatgatctgcatgcaagcaactgtcttcttgacaggaacttcaacttaaagctcgctgattttggtcgtgccaccaccattggacagccgcttgaaggtaccttgcctccacgggccaaaccaatacttgctggaccattgaaaggcacatacggtctctgttccgccagaactgaacagtttgccgtcgggacacttctatacttcatggtatatggtcatgaaccctatgacgacgttatcctcagcgccgcggaatgggatcgccgatttggggaaatggactttccagaacttaaccgcaacgaagtttttgatggtctcatttctgcttgttggcacaatgtctatcctacaatggccttgctagcatacgacttcaaacgcaagacaaaggatatgatctggaatgcagaatacgtcttcattgactctgatgaggagacaaagacctgtgaagcattggttcgcagaggcttgctgggacctgagttagctctccgctttcagccggcctggcgaagatacctacatgctattgtgaagagaagcatgtctatttggcaatgctttctacagagaaggttctggacctggtcttggtgaacggttggggcttgtaccatttgacttgctgaggtgcttggacttatagtcttaacccgaaacaaggacatgttatcgtacggtggctgtttcattcaacttcgcgattttcaaacaagaggcggtcttatcttattctatttcgttcggcacctatcagctgggtaacagccccatagctggtcccgtccactgatcttgctggactgcctggtacacagtgaatcaaaataatgaatacatgagatcgtaagctttttcatgcttcttcaagtcgccttgtctccacaacgctagatatctagtttcccctatcctcaggccaacaagtagtcgtggcagtggctgcttaaatttgccaaggttctgttctgctgtaacgtctggcgcagggaacgtaacatccatcccacgcgcagagatcaaagcgccaaacctttttgtggaagcagaacaccctgtgctgtactcagaatgggtcagtggcaagccgctagcgatctggaattttcaaatccctctcgtccacgggacttgtcctgttccttgtgccgcttcgctggcctggccatgtccactcgtgtgcgcccatcggtctgcgtggaagattttagtagagcctgcttaagagcgtaggcgacagaaggccacacatcatatgaactggctcttcgtactacttctcttctagtccaatcattctaggtccagaccagtcttgagatagtctaaaggcgacaggacggcgatcaagtcagactgccaccctttcattggcttatcagcttgctgtgggagcgggtctctgcagcggctttcattggacgtagaaagcccgtggaaagacagtgtggttggttctcctttctccaccttagagtagctacatccaagggcattgccttcgtacttcactatttcgctggaataactggaaactatgttgtatgactgggctattcaaactatacgcaatagcttttggcgagaaagccaaattccataggctcgaacttaccgatggccgcggatctggggagtagactaccgcagcacggaggctcatctggttggaatacttgcgtggaactgtggacttggaccaccaacactcaactacattgttgaattcagtcctcggtttatttacgttgtagtttgtggtgcaagagagattggtgcaagagaaaaacgagggaatggtcaaagtgttgattaggatggtatttcctacgtggcaacctccaaagatcgccgctgtttcttgagcgtcgtgctccagtatacctgtatggaccctttactcctcccggcgaatttctgtgcaaactgtctcgtcacctccgaccaagcaagattctgtccttccctgagcttcaccaataaagatacttcttcctcggaccatagtaaaccttttctcatacaaggggtatgttgagcatcaactagttcggtatttcggcttggctggtcacagtcgtatgtgatgtctgaatcttggtttgcgatgcatcttggtacagtggcatctgtgctcaaaggtgtagaaatacaatgcgataaagcaccctcaaacaaccaggacaggaactctagccggtcttcgacgggaagggccgagaattgagcacgaacggtaggaaacgaaacgctgctgcgacgatggggccctttattggaccgggcggcaccatgttttgaatatctcttctcagcgctcgaacgtttatttattttggactggcgaccaggaaccgccgttccctttgcattttgtcgtctggattgaacaggtgggtcttgattcggagagtgggagcactccaagaggcatctgtctggacatattgcgatgttggtggtattttccgttgtttgggtctgctcaccacctggaaaggcatgatcgtcgaggattgcgggatcgatagcttcattgcctggaaggtgttgaccagcaagaacggcagggtctgagtcgcacgatccaaaaccggaagatcgatgctccgcacccagacaaacattatcgggtattgtggtggaatcgatatcttcggtgctccgtaggtcttgcatttgcaaaaggtcttcagagtcgaaagtctcagcgtgaggactagtgaaggtggtacggcccaaatcctcaggctcgtgtcgagtggtctgagcgtccgaatgtaggccgtcatccaagcaaacctccaacggcgggcgggcaggaaggggatgccggccaggtttgtgagaatgacttttttgattcttagagacggggtcgataggattggagggaggcggggtgggagtcatcgagacaggacttgggtagcggcaaatatcgagagaatctcgcagaggctgggctttgtcctggaaaggattccatggccgaaaggattccaggcgaaaactagcgtttgacatattgtgtggaacagacggctgagacagtcttcgagatgtggtggttgtgggtagtcataaaacagggagactggcagagaacagagaactagggatgggggataggggataggggacaggggatgggggacagggtgcaggggagaggagaatttgaaggggttttgaattacagttttgccatttgggtggaattgtagtctctttatagacggcggtcgccagtgaggcggaatctgccttctctccagcgtagaagatcccgaccgactcctggaatccaggccactgcatccaagacgcgggaccacaccagtttcacaaccacgggttgtagctcaccggcaaaaatcaccactactcttccttgcggacgacctttgcgatgcatgccccacactagtcgtcagcttgttctccattcggtagtacaggtgtgatcgtggtacggtttccgcagtcgcggtccggcattggccgcatgatgcatcgtcgaccgaggtcaggcgcgtgcgaggcatttttgctattggcccatatcgccgcactgtgctttcgaaattcatcgattgggtgcggagagaccggagagaccgacgatgacgacaactgggcgccacgggattcgcgacgaggcaacggagagtcgttctgcgacatcaggggctgtgcaatgtaacctccgatggggcggatggagcggggcatatggcatcgaagatagtatgccagaactttgcagatgcgatggaggtcggtgaaatgagtgacgctcaacaagcaaggcgctctagcagagaaggcgacctagatagcttcgtaacacggtgtactgtcactcctctaggaaaagagtaggagggagtatcgacacgaaaccgaacgatgcggctgcgggctggatcatcccagggattctgctcctgggcgactggatggcatggcagtccaggacggccagaacgagctgggcgtcggatggagcggcatttccggtaaaatgaaaggggcagtgcgtcgagctgaaagccaatgcgcaagcgacggtgggggcgagaaagaaagggagcagagaagggaaaagagggaaagagaagggaaagtgcgtcgacaagtcgaggggagagggccagcgggtgttatatagatgaatggcagatggccggggcggtaaaagcggccagggacggggctaaacccaaacggggggagggtgagggcgctaaacctgaaggggcagggagatggtggagacgggcaggcggtcggggacggcagaggggcggtgcaatgggagctgtttccagcccaccgctcaccgtgtcaactaatctcgtatagtagtaattaactattagaagcaccaactagtatctaaagttgatttaaatagaaattggacgtggtctaaatctgggagtaggcgatggtcggaaatgcagaagtttagtttggtccaaaatgcagaagttcgggatggtcgaaaatgcagaagttcagtttagatgacttcttctgcattttggaccaaaccgaacttctgcatttccgaccatccggttcttctgcattttcgactaaacggaacttctacagaacttttacatttccgactgtcggattataatccatttttaactatactaaattactatattttagactatattctcccttaacaagtagaagcactaactagtatctacagtattttaaaatagatatatggcgtggtcaaatttctgggagtaggcaatggtcggaaatgcagaagtttggtttggtccaaaatgcagaagttcagtttagacgacttcttctgcattttggaccaacccgaacttctgcattttcgactatcggattataatccattttaactatacccaactactatatttcagactatattctcccttaataagcagaaattatacttatatagtagtaattaactattagaagtaccaattggtatcttttttatcttaaaacagatatatggcgtggtcaaatttgtgggagtaggcgatggtcggaaatgcagaagttcggtttggtccaaaatgcagaagttcagttcagatgataacttctgcattttagaccaaagcttcccttttgggaattttcgaccaaacgctaacccgattcggaattttgaaccaaagctaccgatccagttgacaaacttcaaccccttccaaagaattaaataaaatagatagaattatacaggcatcacatataggtttatatatactatgagtttgtctaaaaaatataaaaatcataaaaatcatagaatagaggctttaatatgtgcctgtattcggctaatagactgctgagtgacagctcctgagtctctaggtgccgcgcccgatgctgctgacctgtatactatatccctggactcttgcgttgccggttcaaagtcaatcactccattccaccattccatcaagatgcgggcgctgtaagattgctcctccgagagacgcggtagtaatttctcaaagttgtcgttatccagcagtagcagccagttctccagtgcccgcttccagccacggtaactgtctgcttcttctgccgttctccgtccagtgccaaaggaccattcgaccatggccccaatggagaacttggagatatcaaccctgtcctcctcttcctcttccagctcctgctgattgagcacactctgaggactacttagtccgcctagcgtcagatctttcaagccccgcgtagagaaaaaggcaccaatcaacatatcttgggccattttctgggcgaccaaaggagaagaacccatctcactgtcgcaggcctcgctatccgtcacaaaagccaacccccttagagcagccacgaggagtgaataactggcattgctctctgtttcctttctagccgacgtactagcctcatagtcaaacgccgtctccctaaattgatccgagcccaacccacagattccgcggatgcagtgggcggcgagtagttgcgggtgagggccaagagcttcttgtccattgccgagataagatggcagctggttttgcgggggtatacctgaagtttccaggagacggttgtagaggttatatagccctttgtagaagttttcgggcgcgacgaggttgtcgtcgatgtctgcaacgaatttgtacagatttctggccattttcgatcggcgctgagaacgaagagggtggattaccctcctctcgcgattgaaattgcttgcccgtgctgttgggagcctcgcccgaaggcaccaatgggttttccccacgtatcgtgtcacttggccatggcgctatgcatccctgtcaaagattgtattcgagggttaacttttgtaaagcattagatagatagatcccgtggattaggcaactcttaaaactaagacgatccagttcagctgtgggagaagcaactgagaaacagagggcaaaaaagccgagataaaggtaaaaatatatatagcccgaagggcttgttcagacacttggtatagttttatactaggataacgtatgtaaagttcttaagaatatccgggtagtctcctacattacatgaataaattgcttaataccgtgcaatttatattacaggggcgcagatgccctacaatctacatactgtattatcctatatgccttgacacctgaatgttctgcctggccggtcacgtgttaccctgcccttgggacatgcggcggacggaaatccgcgccaatgagcattgcgggactggaagctggaggaccactctcggcctgttttaagtcgcttcaataccggtagttcctgcaatgcttacatgctgggtggtctcgggtctactgttttggaagcggaatcaaggtgatcagaaatacgaaagatttcctggaatcacgtggcatgggttgcgtacacctgacgaggctgtgtgttgcctcatgcctgcatggcctcagccttgttgcaactgaacatttgttcttatcatccccccgactgcagagaaagggtcggggtgcccacgctacattatgaatgatggctcgacgcaggctcactcatcacgagtatacagttggatggatatgtgctttgccaatcgagttgaaagcagcgtgtgcggtactcgaccaagtccatgagacgctgccttcagccgaccgcgacgacaatgtgtacacgctggggcaggtggcccagcacaacatcgtcatcacatgccttccgaagggaatatatggaacaacccaagctgcgattgtcgcgcaaaggatggagctgagcttccctaatattcaataccgactgatggtcggggttggagggggagtcccttgtcctggcgatgtccggctgggcgatgtggtgattggcgtccctggcgctaattccacggggattgtcgcttacgaccacggaaaaacaactactgctggccatctagagcagacagtgattctcaacaaacccccgttgaacatgctcaaggcagttcctcacctcggacgccgtgttcggtccgtcagtcagactctgcaatcagcgatcgcgtcagatcccataccactggcagaatttgcatgtcctgggaaagagaatgacaaactattcgaggccgagtatgaccatccggattcgagtcgaagctgctcaagctgttgcgatgaggcgaaggttttgcggagacctcaaagagaaagtgtcgagccacatatccatacaggaacaattggatccggcaatcaggtcatcaaggatgctagaacgagagattctttggccaaagcgcatggaatattatgtttcgaaatggaagcggcggggcttgtggactcgtggccttgtttggtgtttcgaggcatctgcgactattcggactcccataagcagaaacagtggcagccatatgcggccataaccgcggcagcgtgtgcaagaagcctaatgttgctattgaacggaaagccacgtgaatgttaccaaaaccatgaagaagttgatgttccactggcctattcagacgctcgaaaggaatgcgttcagatcctatcattcagcaaccctattcgacatagggaagacctacaggaacggaaaggaagaagggccaagggaacctgcgagtggatgctgaaaaataacatctttcaagagtggcgtgagggttctggaaaaaacgattccaacattctgtggcttcacggcttgccagcaagtggcaagtccatgatgacaatcttccttaccgaagccctggagaacgatccaaatatgggagatgcaggcctggtgatttatttcttctgcgattccagctcccagaatcacacttcgggaatcgctgttctgagtggtttgatctggcaattgatcaaagatcgaccaataggtcaggaagtggttaggagatggtatgaagacgataaggtgctgtttacttctttcaaccgtctgtggaaattgttcattatgttgttgaatggtgggagcgaggggaaggtttattgtgtcattgacgcccttgatgagtgcgaccgagagtcacaaaacgcgatattgagaaagtttgagaactttttcgacccagagtactacgatcgatccctctcacatgtctatttcctcattacaagcagaccgtatgaggagatcagaacatacttggggggctttgtcaacgcggatatcggtgggttcgccgaggcaaaggatgatggtgctgcgttcgttgaaaactctgtggattacttgaccgagaagaagaggttttccactgagatgcaggggagagttcgtcacattattcaggaaaaagccgaagataccttcctctgggtctctttggctatggaggaagtgaaggatgctgctcgggcggatatcataggaatcctcgagcaattgcctactggactgagcagtctctatgggcaactgctcgaaagggcagcccaggctcgacccgagagcaaggaagacattcttcgtattgtcaatatcgtggcagtgtctctggaacctctcagtctcttgcaattagcctatgcctgccagttttatgcacaggaaagcgaggaagaacaggtacttgcaatgagaagctccatccacgattgcaagcttctggttgttgaaacaaacgataaagttgcattgctacataagtcagtcaaggactttcttacggacgaccggtataccagcggctctggccttcgggctgcccatgcgtttctagcgtataggtgtatcgatcgttgcatggagactgggcatcccaattgttgtttcgaaatttggcggccgcaaagatgagaaaattgacgatactagcctactcccctatgcaattcgtttctggccggagcacgcacatttcgcgggagagcagttcgagatcatcgagaaacaggtacattcttcaaagaggactctcttcagtggcaaaattggtggtcgcacctttctgcttcacaaacctacaaaagatgggcaaagccttctccatttcacattgctgcgatatggggaattctaccactcgttaagtacattctgcagaccacctcagtggacagataccacaggaccgaatatttggacaccgactttgtcacacaggagggcaagaccgctctagaactggcggcttcgtcggggcatgaaataattgtgtgccatctactagaaaatgcaccagcagagatggtaattttcaggggtgtcctagaagcagccatcaagaacacgcaacgaggggcgcaaatcatcgacgcgctccttttgcatccacgagcccgcacatcaaattggaaccatgcacacctcgtcaaagctgccaaaaaccctatatgtggtcgtgagattttacaaagtcttcttaagagggtccctaagctacggagttctttggatgacgacgtactagtagcagcggcaaggaacagcgacttggagcccatgagactgttgctcaccgttgatatggagaacacgaacttgagtgaaaaggtgttactgaaagcggttgggaacaaggcaaaggggcataacatgactcaccttctactcacgtctggaaccacaggttcaataacagagcctattataaacaaggcagcgagtaatacccgacagggactttccattctgagagttcttttgagacgatataatggaaggatttcagccaccacattgatccaggcagcgaaaattggacaagatcgtgctcatctactcctgcagcatgcctctggaatcgatataggcagcagcgatatgagagcgttccagcttctcaatccagaaactgctataaatatggtgcgaacaatctttgtcgagaatggagagccaaattttgtgaatagcagaattctctctgcttgttgtagacacctgactggtgctcaactatcgttgatcctcgggcgaagagaaaaccggctgcacattacgtcaagtctattcgcatcggcattgaaaaatgagagacactgtatcccagtgatggagagcctacgacaatactgggaaggaccaattccatttacgcggggggtcctaaacaggctcatgcggttgaatggcagctatgaagttatcaattatgtctgggagcacactgacacgggaacagccaatatatcaataggtcgctggggttgcattttcacgggagtggaaggggtcaacaatgtacaagcactgctggatcgcgacggcggagtgatgataataaggcagcgcgacctctatggggctgatcgggcgcgacatgccagcaatacctggaatcaaatcttgcaatgggccttggagcgtccgcgagacaaattgcatatcacaccgcgtgctatggagctgatactccggttctggagaaaacagacagcgcggactctattgcagcaggaccagcgccaaatatcattccatgaggaggctttgaaaatcattgtggaacggtttgatcatttcgacctgcttacagtgctgaatgggatgcaaaacccgctgactgtgacggagggtatccttattgcggcgtcaagaaacagtcgttgccacagagagatgctccgcaccctcatagacagaatgcagcaaactgtctcggtcacccctcatatcattagagcgattgcgcgagcagatgaagggtcgctcgagttgctgatgtccaaaaacgacggctgcttcgaaattaccgatgatgtggtgatggaggtatttgagaacgatcgaaatgattgcaaaatgatgcgtactcttctctcccagaacaaagagaaacgaagtataacatctcaaggtgcagttgcaattgtcggacatgtgactgtggtagagcttttgcttcgggagtatacgattgctagcctgtcaaacaacatgattgtggccgccttatccaacagtgtcaacccctctcctatacttgaaatacttctgaaacagtcgagagaatggacgtttgatgggacttggtggggctcaattactcgggcactctcgcaagatacatttcagtggctccacgccaaagtctcggataacaacgtcacccccgaatccttcctacaaggtgccttgtcaaatccacgactgagttttcagtccctttgccatcttcttgagtcagttcctgcccaggagacaatatctcaacgcttggcaggttgcagcgcgaggaaccaaacccattccggccaccttgtccagttcatattggccaggaatgatgctcaattgatcttcatcactgaagatcttgtgggaggtggtctgggaacccagaggctcggtgatgtcgctttgaaagatctcctctgtattgacagcaaccgaatcaaggttacacacagtggggtatatactatactgcgctggtatgaccagagcattgtcgattgcctgatcaagagaacgggaacagacgttcatttcacagctgatctgattcaggcgctcattttgaattcaacccatggtaaagatattatgcaatggttgctgatggaagaacatatactgctttcgctatctcaactagccttgattattgaaagtggatgtttcaatgtcgatgttctaaaacagactctgactggcccttctgtgagaatgaccgagcctctttttgatgccatcacaggggctgacgatggatattctatgatggatgcatatctcaatacacattctattggttcgattcggattacagtccctgccgttgtcaaaatgattgggacacctcaccgccacaatttgccattgctaaaactgctccttcggcaatcacggacacaggtttacgtcgcacaacctgtcattcgagctgcacttcgagcattcaatactcagaagcttgaatcgtttattgacattttaaagctattgatgacgcgaggagacaaaatctttgcagacaaagggtgcatggcagaactactcgctcacaaatatgcggaatgtttgatggtgacaatttgtgatcatacccttgaggaggagcttataatctcaaatgatatggtcaaggggttggagcactacgacgctatcaaagtactcgtgaagcgtgccaaattccaagttgtcattactgaagctgcaatgtgcaatgtagttgccagacctggttatgcgatagacattcgtctgctgatttcacggccaaactggaagatccctatcacggagatcgttctttgtgcagcactcatgaaaggccgtcgcggatcaaatcatatgccggccctatttcagcatgcgaggcacgtacagctgacatcggtatttttcaagaccctaactgaggcccaagttaccacgatggaacccgaaatggagtatatcgagagtttcttagcatttttcaagacgattcgcctagctggttgtatcagagccgacatggtggatggtattgtcgagcactgctcttttccgatcgtccttgccctgttcgacagaattgatgatcgaattccgttctccaatagtacattgccgtttctagcaagaaaattcaacgagataatcattgcaatcttcctcgatcgacacggcagtaactcgcttattaacgaggaggttcttgctgctgccgcttcaaatggcgaacatgggcctgacgtcgtcactatccttctacagcgcagccatgtccttccaaccgagagcgtcctgctggctgcagccacaaatttggggcaaggtctgaatgtctttaatattctacttgctcatttgtccgagacatcaggaaatatagtggacacagatcgaaaaaacgatgcggtcgcattggaaggtttattagcaaaggatgtcctttttgcagggctcgagacgtgctttgccgacactgtgactaaatatcgcagtcagaaaatatatttcactggcgtcactctccaggatcgggtattgcgtgtagtggctatgttgattgagtgtggagtctctgtcgtcttcaacgaagatgatctcctcaggctttttgaactctacacgctgggcccccattctcatttcatcctgcagacacacagagggaggttaccggccttcacccccaatttgatagcgagagtccgattgcgagtcacaaagtacctgtcttacaaggtgttccgttacgacccgttgtttgtacccgcaattcacctggcgatcagggatattgatcccataaccttcaactctttgatcaagaggagtgaacgtccatcccaggaggtcagcgcagtggtggagtcatgcagtcagcaatggcttgggaaacaaactgtgctccaagtgttgaattcccaggaattggaaattacaggagaaatgataataaagggagcgctcgatcaatttgacagcttcgagctgttacgacagccaaatgtcaaaataacacgtggcgcattgcaaaggatttcgcagcaccttaacccatgggacagctggggcctgttggacctgaatctaagtctgagattgttgacgaggaaacctggatcttcatggtctggaagttcaccgacctcgacctgagtcgcctcgatcccagtcttgtggactggaaagaggtgatcgaaaaagcaggccgtcgaggaatgatttcagaaagtgtgttgtcctcagtgattcgcacgaagaactatgatatggtcgacttgtgcctgaaaaattaccacaagccgctggtcgtgacacaacaactcgtggattcctttgctggttttcctcctcggtttcatctcgaaccgcgcgcacgtccagatgtgaagagcctgcgcaggttacttcaacatgggacgctcgttcaccccatccactcatctagtatcgaaagaatactcgagatattcggttctggaatcgcagatgaactcttcaaaatcaccgaaaatcggctattagttgacgaatccgtcttggtgtccatcgtatccacaaaaaacgtgaagattatcaagtcattcttcaaaagatacacggatcatctgactattacccccagggttctcattatggtcctgcagacagatgcaccaagtcatgttgaggtaacaaccaacgatgaatatggtgaaccagacgagacctcggagtgcaaccccggttggcctgaatccgacgaactctacgacagtaaatcttctgatcactcgagcgtgcttaaacctcgccaatattggtatgctgagccgcaggtgcccaatgatgaaagggacgctgagaatctgaaaatgaacgaagacacaaacacggcgtactacacctctgcgtatttacttgaatatctgctacgctactgcacatacgaccctatggggcttacgaaagatattctcctgtctgccgtggcgaatagagagtgtgaggccctttttacgattattgccaaatactacagccttgaaagcgtgagaattacgcaaaacattgcccaggctgctgcatccaacagcaagcgaaatgtgcaacttctcctggactggttcccgggaaaggtcccaattacagaggacgttcttattgcagcagcaagaaattctaaagagagctacgagactcttcggctactgttctcttgctcttcgtaccggatatcagtatccaaaaaggtcatgatagcgctgttgcagaatcccaattcttgcccttctgcctttcgacttgtgtttgaatatggaggtagcagtctactcaggagccaggaaatcaagacttcgattgttagaaatgcaggaagaggctcggttttgcagttctttctggagcttcctgggttcagcctgacagtgaccgagaacatggtccgatcgaacgaaaacgacggggaacccctaataagcagcagtcttctatttaaggaccgtagagtcaggttttcccctgcttcgattgcattcgtcatggccaagggagacgcagactccactatgtccctgttggagaagctcgccactgaccgagaagaccaccacttaacggagaatgtcttcctccatgctatatcgaatgagcaagaacgggcttggtttacggtacatcatctattgccactcataagcaagttcctcaccgagaaagcctggatcgcagctgccaaaaataaagttaacgggtggactctgatgcaaatgttcgcagattatgacccaactttagaatcaatgactcccacggtacttttgcatgctgcacgcaatgacctgctcggcaatgacattctcaaatggcttttatcttaccatccgtctaaagttcggttctctgagggcatcctggcagctatctcggggaacccgagctggtggacgggtgagcctctcaccagcgagatctatcggccccatatatggcagaatggccccatccttgaggtaatacttcatcaagcccaggagaatgcaaagatcacggagaatattcttatagctgcagtcaagaatcctacgcacagtgctcggtatctcagagtattgctccaacatcctacgagagaagtcttgaatcttcaaagggtcgcagcaatcgctgcagcccaggaatccgtggaaataaaatcacttctcagcttttttcagcacggtgctagaaccaacgaagatatagtggtagcagcaatgagaaatagtcaacgtggcggggatattttcgagctgcttcgcgtcgagaatctctggggcgacttcgttgccactgataaagtgctgtcggcagcagccgataatgcagagaacggaaatgacttgctcgaagactttctgagatcttatcagggagtcattgtgcttcaagacgagcatatcgaaaaggtcgccaactccttcagcttggatgtgatgcgtcagttgcgcattcgccagaggtttcctgtttccaacccgctacctgttttcgcttattctcactatcttttctatgtcctccatcgttggtttgtgctatattgttgagatttttagttgtttagtataacttgtagccaggactagggccaggtctcataatatagtccagcctcggctgtgatagcatggctaaagctggtgtttttcagcgaggataccttttatatctcctgataaaggcctgcaggcccgtaatattttaattttacttctataagcgaggattattactctttatttttttaatctagtaagactagtttaaaaatatatactaaaaagagtatatctattttatatctactttagagatatatatatagttattactagtaatataattaaaattaaagaggctaagccatattgagatttttattaaagagtacggcatatattaagtagcctaagtgatttaattaggagatatagtattataatagtataaattttatagctgtatatagaggtctaatcatgtctataatttctggaactccaagatcattggcagaaagccaaggtgctgaattattgtgggcacacaaacaccatgcatgagctgaccctagaactggaaacgagtaggttgaatctatgcactcttaacttgcacgaccttgttctcagtttcatcaaccaacacctgtcttctttccgtactcttctttcgaggattgggtgcatcaaagatctccgtgagttcttcgagtgtccggttattcgtttcaacagcgaagaagtagatgaatactccctgaacaatgttccagccagccagaatgatatatgtgtgccagccaatagcctcgatagcatttccaactccgaactgatttaccagcaaggcgatattagtgaagagagagtacattgccattcccttggcgcgagtctcgtatgcaagacattcaacagcgtacatggcttgcaaaggagtccatccaaagctgtaaaaagcggcgatcaagaagacaaacacaatagaagcagtggccgcgtctgtgttcaatgtttccgagtacaccccggttgtggctgcaaaactcgcaaggccgatcttcatatcgaaaaattagcggagaacattgataaaagcagagggcgggacgtatatacttaccgcgcaagcaatagacacgccaatcatcataggtctgcggcggatttttgggcccaaataacttcccagatatgctagacctgcagaaactaccgtgatgccaaggttgacgtccagcacacgctccgtatcagtaataccagctgtggctaaaagcccaccaatatagtaggttgtaacgccagcctgtgcccattggctcataaaagatgcaatagccacacacatgagtctccacctcgcggcctttgttctaacaagagacctaaagtcccatgcgttcttatcggaaccttccatgttgattgcctcttcatagtctcggatctgtagttgaacataggcattatcccggaaaccctcgccgtggtacttggcaataatatcccaggcttcctcgctgcggccatggctatagagccagcgaggtgactcgggaatgaaccaaacagacaacactataatgccggatgaaatcagctggcaccaaatggggatgcgccatgcaagagaactttcaaatctcagacatccacgacaagcgccagcagcagcaatagctccgataaaatactggcaattgtaaaagccagtcagaatatcacggtatgcagggtgactcatctcgacgacataggcaggtgcggcggagcctgccagggagtatccccaacctaagatatcctgttagcggagttattcgaatgggtagtgactaggaacataccaaggaaaaatcgactggcaagcaattgatccatgtggttggcagtgccaccaacaattgtacccagaatgacagcgcagcatccagtaaacatgccacaccgtcgaccccaagtatctaggatgattccgacaaatggcagcgcggagacacctccaatggtatacattccctgaatcaacgcggccttggaaccgactaagccagagccgaaggtttcacggaactgctctataggaagtagagcacccataagcgagccatcgaatcctggacagcagttagtggttaacttttcatagctatcgagtgtttccctcgtaccattcaatgccgagcaaagatatgccacaatcaagaataaatataactttctcatctgcacgctccacggtttcgggggatcgctccgcctggctaagtcgagagccagtgagccgtgaacagtctcaaccttgacgccctccttgacgccatccccgtgttcttggtgcgtagcatggcagtcaccttccttctccgctagttggtctggatgtgtagggtctcccatgatgctgaaaggtcttgttctccacgccgtgggaggtaatccgcaaagagtatgacccaattcaacgggaaaaggatggctgcggggtgttatttattctcacaatcatgggcttccttctctcgccctcgccgacatgaagtggtaggtttgtgacagtctccgatgcccatagcacaaccggattctgtcaaattccttgccctacgtttggccaatcacgacagtcttgtggcaatgacagttttccgggacgtgcgcgtctagatccgcaagcccacgtggacagacggcgattggccgtctttaaactttgtgggttaaaagtctgcgcaagtcttgcccggccccgattgacgcggtgccggtagccccgtgaatttctattgggcccaacatgctcattctccccgcaggactcaccccacaattcacggctccgatagacccgcggggattgttggagacccgggggtgactccatgccgagcgtacataccgacgactcttttgccgccaggtccataaaatctgtaagatagtcttaggtccttctcagaccccgacgtcatttagtctaacaatatggtataaaggacgcagggtagcaaagctggccccaactcagtcaacgaccctggagtccgaatttatttccgtcaaattcccattctaggaccatgagctctccggccaaacagctggccttgcaggccgatcccgaacggcccgatttcatgaaccccgcggtctttcgccgaaatacccttcccgcgcgttcttaccacattcctagcacatctctgcttctcaatggagcctgggagttcaacatgtcccggtcaccaccggaggcaccggagcctagcgaggatatctccgccgaggcctggtcgagcatcaatgtgccaggtcattggcagttgcagggttggggaaagccaaattatacaaacacacagttccctatccctgtgtgccccccatgtgtaccaaccgagaacccaacggggacataccgtcggaagtttcaagtgccatccgagtggaaaaccaacaacacagagattcgtttgcgattcgacggtgtcgatagcgcgtaccacatttgggtgaacaaggccttggtcgggtatgcgcaggggagcagaaacgcctctgaattcgacgtcacatcgtttttgcaggacggtgacaatgaagtctttgtgcgggtgtatcagtggtcagacgctacctatatcgaagaccaggatcagtggtggctctctggtaatacttaaatggccctaagtaacccttagtaggacagaggtatgtgctaatatggatcatgagaataggcattttccgagatgtcactttgattgcattgccagccgacgaccgcttgaatgactggtttatccgcactgaactcgattcagagtacagaaatgcgacgcttctcgcaacaattgactaccaagtctccgagccaagcgctgttgtgctcaatttgattgacccggtgcacggcagcaggagcgtcattgcttccaccgagtgtattgtggagccagcaacatctacagtggaattaagcttgcctgttgccaaccccaagaaatggagtgccgagcagccgtatctgtatgaggtggagatgctcttgacacctcgcggatccaacaagccattcactatcacacagcgcattggcttccgcaaagtcgagcgcaagggtggtctcatcaccgtcaacggaaaggccattcagcttcggggagtcaaccgacacgaccaccacccgttgttgggtcgtgccgtgccgctggacttcatgcgcagagatctacttctcatgaaagcccacaacgttaatgcgctccgctgcagccattatccccccgatcctcggcttctcgacatggccgacgagctgggcttgtgggttatggatgaagctgatcttgaatgtcatggcttctatgatgctgtctcacgcccaatggacatcgatgaatctcttggctacgaggagcgcaaggggttgacattcccgcagtgtggtgctcatacatcagacaaccccttctggcgcgaagcgtacgtggatcgagttcaatcaatgattcaacgagacaagaaccatgctagtgttattatctggtccatgggaaatgagtctttctttggcacatgtcaccggtccatggtagagtatgcccgcgctttcgacagcactcgcttgattcactacgagggagacatgcctgcggagaccactgacatgttcagctacatgtacccggagatcgaccggctgcgatccttggcagccaacgagggtgtttcgagtaatggcgagtttgagaaacctatcattctctgcgaatacggtcatgccatgggcaacggacccggcctccttacggaatacgagaaatgctttgacgagatcccgcgtctccagggtggtttcatctgggaatgggccaatcatgggttatacgttgaaggaaacagcaagaaagacggcttttatgcctacggtggtgacttcgatgactatccgaacgatggaacattcgtgatggatggtctcctgaacagtgcccatcagcctctaccgggcctgttggagctaaagagagtctatgagccagtcaagctggaagtctgtggacagcgcttggccctgaagaaccggtacaactttttggacctgaatcatctccaagcttcatacaagcttgaagcatttgacaaggagtgagtccacaactctcgtttcaataaattgaagacattctaacttttcaacctagaacaaaaaccttggcaactggatcgctagacctgcccattgtgcccgctgggcaatctgctgaaatttctctcccggaagagctattccaacacaacgtccaccccgcctacttgaccattacccttgagcagcgaggaaaggtcgaatgggatgagggaacttatgccgttgcttggacacaagctttggtatcacagccaaccgagcaagggctagtcaatggcttgggctctgctcagagcgctctctcaacaaactccaccaagacaactatatctgtcagcggagccaactggtcctttgagttcgatcgcatacgcggacatctcaggaaatggacacacaactccagatctattctcgagccgagtcccgacacagggcttgctatggtacctggtttctggcgtcctccgacagataacgacgtacctcaggcagcgccgtattggaagcgattcggtgtgaactgcctcacaaaccaattccgttctctcaacggatcaacactggaggatgggagtgtctgcatcgaaagtgagacattcatctcgcctccggttctttcttggggatggaaatgtcttgcgcgttataccatcaagcccaacggctcattatccatcaccatgaacttgcaacccacgggtgccgcaccgtcaactgttccacgggttggtctcaatcttcgtgcaaactctgatctgcaggcggcacgttggcttggacttggtcctggagaatcgtacccggacaagaagattgcgcagaagtttggtttgtggaatgttgatgacattgcgtccttgcagacggtgtatgacattccacaggagaatggaaaccgcatggatactgcctgggtagaaattctcgctcccaatggcacgggcttccgtgcaagccctcaaaaaagtacagtggtgaatgggggaacgggaagcctgagctggacagctagccagtactctgatgagactgttgaggcggcacgacacacttgtgatctcgtaaaagatgatgccgtatttgtgaggttggatgaccacgtcgcaggcgtaggaagtgcggcctgtggccccggagtcatggatgagcatctagttaaggtgcaggatctcacctttggtatggtattggagcctatatcttcgtgagaactaaaaagctagatcttggtttgttcaatagattgcagtcccatgtatactttttaactaattcacccataactttttaatctgaccagttcgtcagatttcagtcttagtccacagctataaaggttctatagaagcaaactagtacacatccctggtgtcgtaacactcggctggtataccacatgagccgtccgtctttgttggtaaagggcaatttaggatggccctatgttgtggaaacgtctctacaaggccaacataataaggatccattaattatcattagacataaatatgtaaggcctatttataccattcaattctagcgctaagaacaaacgagctttccttgtgtgaccctatactgaatacttcgtttactgtccaaacggtgaatgtttctgctttggtgactattcatgaggcagggcaaaaccatgtccctgctggttgtttcaaggctgaaagtcgctgaagtctcgggatagcaaggcttctagagagccggacggattcaaataacccccgtaaggaccgagtggttgcaatagcggcgcaatagagttccaatacgtgcttttcaggctcttctgagaggcagaagggtttgaacaagagagatctatcgctgtcagttctgcattattgaaggcaatagagttttgagatatctgaggcaggttggccaacgccggccggactcccgggacaaaggacaacgggtcgtgaactaatagagccccaattaactcttgagttctagacaccaatccgagctgtgttgagatagttcgagacacatcgagtcacattgatagtgccgtcttgtttactaagtggtatacatttcccggactttgctaaatggcttactgacaagtactatctgagaggcattcgaagggacacaggagagagatgttgttcctcctccccgcaaggagcaaagtctgcacttttgctttcgaagaacgcgtgggctttcatgatgagtctcaatgccttctccatactgggagaaacggaggatccatggatagtcatccatcgttgcaaatgctgctccaggcggggccctagatctagcaacggaatatggcgaagctgcattgtcagctgtggatgacagaagccacccatgagagtcaagatcgctgtctcgagtctaacaagataattcgttgtatcagcaacaatgcccaacagttgcgaagtcttccggaatcagacttacgagagcgaacatggccatgcgtctaccatgacagtatatggcacctgcttcaggtgcctcaatttgaataggcaagtgtcgagggcaacccgacagccatcgagcacacgcagattgttgttaagatcccacaatggattagcgagggcccactccagatatggtcgatagatgacacttcgacagctgaggtaccactgtctcaaatactcgctgtgcgggtcgtctgcaggcttgtcgtcttcggggaatcgcagacttggaggtagggtttgataccagtcgtgtagttggcgtgccagttcttggttcacggaatagaaattattggaatcaatttgaaggcccctgtcgcggtcatagagcatgtagtgggcgcggttgaggaggcgacggagtgcaatggatgctagaaagtagaagttggacttttcttcctcttcaatagcttcatgtgagtggaattttcccggaagagcaaatactgattcgatttcagtattgctgttttgcggaagggagggcaattcagagatatagttgctagtgcgagtcaggcagtgataagggtaaggtgtcattgccattgcttacctttctaatacaaagcacgaccagaatattctagtgatatgttctcggtcatcacgctcggggttgtcaagagggcaagagagcaggaaacgagaacgggtggccgcgctgttcacataagaccacgtttgcagtggcctttgcaagaaggagaagtagagactacgcattcgtcagtttcatctggacacgctgtttcggccggtaacaatgtcatcatacccagtcagcaagaggcattggcacgcttccatattcatttcaatttgggctaagtggagcatcttcattgcagcagtgaaccatgattctccttggagcttcagctgttgagacttgctttcagaactgtcctcttcgtctatcacggacgcgccgacgcagcccaaagccatgaccaacaatgcgagacacgattggcagctaggctccaaattctcttgccatatcctcaattgcagggatttcagctcgtccaagctgatggtagggaaccaaaagttatacgtccgttggaatacacctaccatatttttgacatctgacaagcccgcgctggggactatgccatagagtttgcttggaaatgacggtcgtccgtactcgagcgacaaaaatgaggactgtgcctcctccaatattgaagggtgatcactaaacatgttccacttcaaaagagactctgctgaggagagatgtcctgatgaaagcaccgcgctttcagtggggtccatagttgtgcggccccctggatgatggcgtgcatcctgagaaacccgggtaattgtcggacaggaagacgttgtatctgcctgaatgtcactcgtcacacttgaaccggagcccatagcctgaaatatgtaatcagcgagtgagaaatagcgttgcgccattcgttacatacgaccatgcccttaagttcatcaatggaagcttccatccgcaagaccgtatccaagatcatttcgcttttcccccttctgatctcatgtcaattgccgatcatcagcatggcaacaagtcacttacgatgtagcttctgttccatatgaacacatttggttcaagctcacgcagggcccacagggatcccgagcgtcacatctgtcaatcttgtcaatcgccgtgtactacaaaataacatgtgacatgactagccttgtcttgcggtggcggcatgagtcgcactgttgggttgggttgtattagtcttggtgtctcccgaggaatggggacacggaccgctcgagccgccctgaatctcttcatttcgagccaggacgctggtattaaggggattccccgtgactgaattcttgatcagcttcgacaatgagcttctattgacagcaattgagcgaattaatagtgtaggcggcgaagactcgggtggaaaagtcgcagtggcgtgaatcatgtgaccacgatagggcctctcaccctccgaatgactaatcggcatccagcactgtataaactatcgacctggtagattagatatattgaccagtatattgatcctatcctacaggttagatgctcccaattgggaatctacatgaggacttggatagctatgtagtcctctaggttgttgttcagttggtggttaggtctctacattctaacttaagcttagctgattataaagggcttatataaataaggtctagcggtacgatggcggattgacatatgtggtaggtgagaggcaacacgccgcagtggagggggccggctatgttatatttaggcccacaacgtgcaaagtgggcaagcagtaaacacgacaaaaattgagggagaaaaagaacagcagatatcttggttgttggcaggatctattacgcaggaacccattatcatacctggaaacagccagccatccataaaagttaagtagcccggccacccttgcaaaggtctcatacccaagggctttgatttgcggtcttgaaagatacatcacagatcggcttctctgtgaagaaggttgagagcaaggtgaaggttggaaggtgcgtagaagatataaacaagagttgagtggctttccaagcaagtctaccatttgaatattcaaaccatcgagagtctagtattacgtaccggctgctgtggattgtgcgattgaagctattgattggagcgaagggcagaaacaggtgcgcagcagagctggagctgtacgtcgaacgactggcggcggctagtagggatcaaagaactagctttaaataacaagttaataattaatctaggctttacaattagtatatacctggtggacactggtatgatacctggccaagtctagggctaggtctcatattatagtcagccttggccgtggcaacatgctcgtagctggcttagggctttccgcgatgatgcctttcgtatctcctgacaaggccctgcaggcacgggatgccgttgctttactcctgtaaagcaggaagctattgcccttcgtctttcgaccaggcggggcctgttcagaaaggtatggtagggcgggcaaaacagcatacctacctggtgcctattctgaaggcgtgcacatgcttaccccggcaatataattggatacctaactgctaagccacgctaagctctcgactaaagagtgattcacataccaagtagcttaagcggctgttgaccacgggacatagcatcatgatagtataaatttcatggccgcacgtgggggcctaatcatgtctgcaatttccggaactccgagatcgttagcacaaagccaatgtgctgggtattgctttctcagcaaaagagagcacgtgtgtgaagcttttcgtcgtactggatcgttgaccgtgttggcttacattggcttacggtggttcctgcgttagtggccccgtaggtatgtagtcccgcccgtgcaagtggccaagggcaaacatcgtatattctgtataattatattgtcaagcaagatgcatatataaagggcagcttgatgccatgagatgtcaagttccaagcctttcatagttatcactgcccagacggggattacactatggatctcagtcgccgcattctatgctttattttgtacggcggcctggctgtcctcgcagaagctacgctgccgggacatagtacatgtatagccagttcttcagccagcactccggtcaccgctccaactagcactacaccgtcctttccatcgacccctccacctattgtgtaccaatggctctatggccttgttgcccccgactgggacggtatgaactgctctcttcctgctgcaactgacagtgacatggaccccttggagcggtgggagcagctcaaagtcgaagatgcatggaatgctgcggtagacaattggaacaccaagggtaatgacggcggaacgcaattctcccagtcactcggctcgtttttcgaatatacggaaaccctgttttgcgagaacctagccgataatgatggctgctccaacctccaagtcaagtgtgatgagtttaaccaccctgctgggtacatgattgtactctccatgatctggcttgagcgtgtaagtcattcttactttcatgaaacaatagtgctaataaacgtactcagcaatacttgggaattaatagcgctatcaccgcgggcagtaatgctgtttccgagcagctttcggatatgcttgggacctttgcccctttgaaagaggagggtcttagtgttgacaatataatcttggatatcattagcctgggcttttccctctctatgtcaccgatgtggaataaaggtaagtctacctatactgaatgaacccttctggtgttaatcggtctcgtcaaaaagttttcaaagaatcgaaactcgttgctaccaagatgaacaacaaggatttggccaatgagctggggacagtcaaagactgggtaaacccgctggtcacacggcgttcttgtactcgcctcgaaggcactcgaagcagaagaagaagatacaggcaatcaggaacgtttcgtctcgctgcgctgtctcaggctgtattgacaccaactctcgtatggctctattgtagtgaagcagcataaattgcgcgtcggtgctgtttgccagagggcctctcccatggaggacaaaggaccgatggagagagcccaaggcgacggcgatgctcctcaaaatgggctggtggtacgccacgcgaagtagcagaacgccgatatctgcggtgaacgcctgggttgtattctggtggaagaattccagagagcgatactcatcctcgctgatgaggtccggcgactggtgggtcttccacatgcgagttggcttcgagataccggggacgtgctgtactacccggaggctatttgacgaggcaccctcaggagaccctgaatccaaaccatctccatagccatcacaccttcttcctgcattctcgcacctgcggcaagtaggtctcgtctcgtcgcatttgacgcggcgggtcctgcagtgccttatggttaatagcaagccctaacgggaggacacaccaggaactcacttgcaggtaatgcaaccattccgagacctggccgtcggcacacgatcacttggagaagccatgatcaatatccaatatcctctcgatagctttctcatgaacgcctcggtcggaaagctggtcttgtactggcgcatactctgggccgtgcatgagccgatgcactgcccccgcgtgaagcccaattgccccattgctttataccagctaaacccaccggtctttaacaggcaaatactttctgacttcatggtcttcggtccgggattccttggactttcatcaggccatgcgccgggtcctggcgggatttcccaacagcccaaaatacatgggtggataggaagcaccgtttgacaggcacggcccttacctaaatcctacaaggtagactgctagtaaaatgtgacatctggcagtgagaccaagatagaaagctcactgggctcactgtgatgtgatgttcatggctcgttggggtccgtttatcgcaaggcgcagttcatcctccacgctttgaagataaccgcaggaatcgtatcagactcaatgactgtttatttagcctataacttccagtcttgccaaacaagcctcggtatttgttccgtcggtattatgcagtcccttcggttatcagcgcacggagtacgaaaagcctgggctttggggggcgagtgttcctgtgcttgtttagttaatctatggtagcgccattaattttgagcaatatagaagggtaaataatagcgagcaacaattttacggttgaatagtgtccgtggacacatttctgcaacggacggtgtttgcgatggtcgaaatatttatcttcacatatgaataacaggccgacggatactcggcgatgtcgaaggaaagggagaatgccacgaattataaccatcatagcctcatactgttcgttcacggctatcttctagcagatgtgctgctcaccaccgccggtggtctcgaccagcggcgatcggagacaagtccgacatttaaacgccaaaatccacgggccctctgatgctcaagaaacagaatttaattggacaatccactacactagtcttctgaatcagagagtggagagctcgcccggtgttggagcgatggagccagtgctgagccagtgctgtgggggcgagatgggctgaccgagtgccagtcatcgcagaggctctcaaatgtcttcatcctcacaggcgcaatgtcgacaagccagagctctgcccagaaacgaaaaagaccgtcctcggcgtgtaaacggtgcaaggaccagcatatccgatgtgatgcggagacgaaaggactcccctgttcgccctgccggcgagtgggcaactcggattgtcaaattgcaaagacgaaaagaacacggtatgcattcaccactgtagaagcagataacgactaatatagcctgcagaggaagcaatgggcgattcgcaaccagcgacctggccaccactgagtccatagcccaacccaaccaaacgacgcgcatatcggatcgagttcccccattctcgattgacgtcgtagccctgtgcaatagccaccgccgaagatgttatttgtctggtgatggatcattgagcggccaggatcgtttgtatgcaagcacgcgccatcgtcaggcgtccgctcctcccatctggggcgagagctggtatctgtcatatgtgatccaaacgacaaacagcgaccaaggctgcttatatcggcctatacaggatgaacaaggaaacactgcggtggctcaccatccacgccgcgatcacaggtcgacaagcatatcgcagcaccttctgccccctgcgcagctagtcaatgacctgctgcgtggctacttcgttatattccacccattctgtcccatcctagaccgggaagcattcctcggttccgtgagcgatgggtcagtgtccaaggtcttgctgcgctgtgtgctttttatttcctcgatccactgcgatttgaagacgatacacctcctgggttattccggacgtatagaggcagaagacgatcttttcagctccgcaaaggccgcttttgactgcgaaccggaaggggatcgtctggtcatgcttctatgctcttatctcctccactactggtccggatctgccagccagagtagagactcgctatggtggctggctggcacgattcgttctgcacaatgcatgcagatgcatcgcaaggcccagcaaaggaatttccagccagaacaagagcgtatgtggcgacgcatctggtggttactatacgtacgtacctttacctggatcttttattgccctgctaagccatttcgaccagattcgtgatagacagatatcgatctcgctgggaaagcccatgatcatccacgactgcgactgcgatgttgaactcatcagcgagggtgatcttgtggatgaatccccagaaacaattgcatatgtactggcacaggccagactatcaatcgcaggttagagacccaaccctgcttcagaggaacatcactgacggattagtctcgaacgcactgagaacatatttcgcaccctcaagggactgttctatctcagacgggacaatcgtacttgactctatatgtagggtgttttcaacttgggaagagagcctctcgcctggtctgcaatgtcgttcgactggcaatgcccagcttcagcttattctcaatctaacttctaagtaagtggaaggtttcttaatagaaaagcactaaatgtggtcagttactatcgcataattgttcatcagaccttccagcgcacattccaagaccggcaaccaaatacgaccacggccagcaacgatataataatggatgcagccgaacggattacctctatggctgaagacgctgtcactcatcataaaggaagccacttccccatgatctggtatagtccagcgtgatacgctgccaagcatagagaaagtgactagagctgatcgaatatccagtgtatcggccatatttgcagcaatgactgcgcaattcacgcacgcaaatgccacaaaccaatctacgaccaaaaggaatgcgctactggggtccatcaagtacaaaatgctcgctttgaaggattttgaggagtgccatgtgctggcaggctggatccgccagttgttctttgacatgtttgagcaacaacgtgggcaggacaagaatggccacagtccagaggccgcaggggaggacttcaacattccaaattcagaggcactagatacagttggggacacttcgatggccctcgacgttgacagcattattgccgacataccgcgcccggccccgtgggaattgccctacacgatgtccaatgacaatatcctctggcacaattggctattggggtatcaagacgggggatgatagcttgtaccccctccctaggatatgagatggcgtatctaccactctacctgaatgataacagactaccttacagattatagcggaaagtcggtgccttgtcgcccatttcgaatatcccatccgggttctggctggccgttgcttctccacggtcgcgtttagcattgatcctccgacacaggaaatagtagaggaccacggtcaggaagcccaatgccacaaaggccagcaccagggagtgtcccaggcgatacctgggggcgtctgttttcttgtagaaattggacgccgccgcgcctcctaaactcccaagcccaatctgaatcgccattccgacagcgcgtttcgtagccggtgcgtaattgttggacgacagggctaggaggcccggtatagctagactttattaatatatcatccgtgactactgccgaagtagtagaggtacctgggtagctgccactggcagcgataaagcatcctgcgtacgtcaagcctggaatgaatcgactgggggcaacggcgatgaggaagccaacaaatacagcgccatagcagacaagcgtgaagagactcctctggcccatccggtctgagaagtagcccacagcaatgcacgctatggaggcagcggcgtagacggggatggtcagcagctgcgcgatggcggaactatatcccaggccttttataattgtcgggaggaacagcgagagtgcatacacagctaccgcctggaagaccgttaagaatgttcaagtggtttgtgcagatgtcttaccgctccccagtagctgatggcgtgcatccatgtctagagatattgtgagtgccgctgttgtattaaaagggttgataactcacttgccagtctagaactgctgccaagaattgtttccagtcgaaagcactcttctcttccagctggccttcgctagagctcgctcgcgagtccgccaacaggtcgatgatgatggccttttccctgtccgacagaaacgtcgcggtcgatggctcatcccagatcacgaagaaggccaggaccgcgcacactactgtcaggagaccttccaggataaatctgcctcggatcagcttcatatcgtggataccaagtaacagcaactcacatccatctccatccttccaaccctccgactccatccatcttgctgatggcaaaggccagaagaccggagaacgccccggccattgaggcagaggcgaagatgagggcgagtctgaactgtgcatttgctcttgggtacctgactaggtgagcgtttataccgcaatagatggactagaatataccagagagatacgtagaacgcgaggccgggaactgtagcgggtcaataacaatgaccgagagtctgaatgatggatactaacaaaggcctccctccgacaatcctgcgaagtgtcagctggatagcagaagagggatgaaaatatggacgctggtgctcaccaagaaagaacctcgccgccaatagaccggagtaattctggacaatccctagaagcgttgtgacgacacctacacactctaaatatcaaatttcaaagactctttattatgcaggcacttaccccaggccaccataatagagggcagccaaatgctgggcttgaacctgacaagcaacaggttgcaaagcggctcgaaaaaggagtatggaaagaagaaaatggtcaaacacctgggtctgttagctcagcttgagggtaatatcccggcaaatcctaccagttatactgattcccaacgagattcaagtcagtcgaaagcccttggatctcagcatttccaatgtttcctagtcgagtcagcgtagaaattcatggcgacagaaggaacaaacctcggtcaaggaagctgaggaaatacaagagcgcgaggattggaatcacacgaaggtcgatctttcgcagcagccggcgcagctcggtagggcagggttggttggcacctccaacagcgtcaaccttcggcgaaggcgcgatctcctgcgacagggtttctttctcagaatccatctcgttggctatctatctagtcagaccgagcacacgagacaacgacaggaattcacgagtcctgcagcgggcgcaggcagagtcttagccttttagcactcgggggagggccgactctctccccagccgctaggggggatacaatgtggaggcggggacagccagccactagactggcctgtgcagcgtaaagacacggctttggcgcttgcaggattggagactgcggagagaagccagcagatcaatgaattggcagtgggccttttcctgcgcctgcgccgagtctgtgctgcattgccgaccaccgccggtggtgaatctggcgatgatctgcatatcaagaaataccttgtataaatgttggccatgctggacattgcctggcatcttattcggtccaggttgtaactatctgcaacagcgggactacaaacatggccgagtacgctcggtttcccagtcttccggacaatgcaaagcatgaggacggaactccggtgctgaatcgtcattctaccttcatcacgagaggacatgacttccctgctgccaaggtactatttccacttcgcagtataccaatcgagcgtcatcttacaccaccaggctatgctgtacggcgcaggagtccccgacccagaggcaatggcaaagagcccacatgtcggcattggatccgtctggtgggagagaaacccgtgcaacatgcacctgttggacttgggaaaaacggtgaaaaaggcagtgcaggagcaggacatgatcgcctggcaatacaatacaatcggggtctcggatgggataacagtgggccacgagggtaagttgatctaacacttcactacctcgaaacatccaactagttctctgtaggaatgcgattctcgctccagtcgcgcgaaatcatcgccgatagcatcgaaaccgtcacctgcgctcaacaccacgacgcgtgcatcgccatccccggctgtgacaagaacgtccctggcgtggtgatgggaatcgccaggcacaacagaccttcggtcgtcatatacgggggatcaattcagattggcttctcgaaaacccttcgcaagcgcatcactctagggtcggctttcgaagcagccggtgcatatacatacgacaccttgcaggacttggccaccgaagacagcatcaaaggcctccacaccaatgacgagataatggacgatatcgagcaacatacctgtcccactgctggcgcctgtggggggatgtttactgcaaacaccatggccacagcgattgagtctctcggtttgagccttccgggctctgcctcaacgcctgcttcctctccttcaaaaatgagggagtgcgtaaaggcggccgaggcgatcaaggtctgtttggagaggaacatcaagccgagtgatattctaaccaagcgatcctttgaaaatgccttggtcatggtggttgcccttggaggcagtacaaacgccgttctccatctgctggccatggcacgaactgcagacatcgaccttacccttgacgatatccagagcgtgagcaacaggatcccgtacatcgccgacctcgctccaagcggaaaatactacatgccagacctgtacgaaatcggcggcatcccttccgtacaaaagttattgatagccgctgggcttctcgatggcgatatacccaccgtgactgggaagacgctggcagagaatgttgcagggttcccttcactgcctgctgatcaagttataatccgcccactgaatagtcccatcaaggaaacaggccatattcagattctgcgaggaaacattgccccaggcggctccgtggcaaagatcaccggcaaagaaggaacgcgttttgttggcaaggctatggtttttgacaaggagagacatctcaatcaggccctggataagggtgagattcctcgtggcgagaacattgtcatcgtggtgcggtatgagggtcccaaagggggcccagggatgccagagcaactcaaggcaagcgccgcaattatcggagccaagctaacaaatatagccctgataacggatggaagatattcgggggcgagccatggctttatcgtgggccatattgttccggaggctgcttctgggggtcccattgcggtggtccaaacaggcgatgtcatcacaatcgatgcgcagaaaaaccagatcagtatgaatgtttctgacgaggaaatgaaaagacggctgcacaattggaaacccccgaagcctgctataactcgtggtactttggggaaatactctcgtctggtgagtgatgcctctcacggtgcaatgacggatcttttctagacagataaacaatatacactctactatcctgtgaactggtatggatcatctaccagtaattggtattagtgttggtccgtatataattgagaatcagaatcatgttcattcgcattggctactattcatatcgaaaccacagacatcacgcagaaaggtgtacagcaacgagtgaactaataataccaaagagacaaacagcgccctaagcgagaacccatctaagcgggtcagaaggctgacggtattaggttggatgaaactacttcttaccctcaaaccccagcgccccagtcaccgagccaagtccaaggccatcgatgagcttgtcgattccaagtccgcccagcagtcccttgagaagacccccaagcccaaggccgtcaagcagcttaccaacaagaccgagtactccgctgagcaagagcccaacggcggcaatgatctggaacaagggctccgatagcagcgcccacagggggttgatcttctttttagcatggggcatgtcgctgatatactcccggcccttttcaatggtctcgacaatggtctgcgtcagctccttgagcaagtcggccagttgatactcctccggcgtggcttcgtgcgatgcactgcgagcctttgcggtagctgcaatatggccgtctggatcgagtgccctgagggagcccttgcattcttgcagcccattgcctgctttctcaatcaagggctttacgtcttttaccagctgctcctcgtcaagttcttcttttggcgtgcggctggctttttcagtgcgctatggccgtcagtatgatatcccagggtagtaaagagagacaataaggagagcttactgaggttatctccttgcaaattggcccaacagagtcgattgtctgctgcagaatggtgcacatcttctttgccagttctgcgtcttctttctccttcttctgcttctcctgctcctcaggggacagctctggctctggctctggctctggctcctctggtttgtatcgctctgcccggcctataacattgccagtcttgtcaatgacctctccatcctcgtcaacagcgcgtcccatcagtcgttgggggtcgccttcggtcagcctgccgacgacttcgcctgaagggtccatcaccataccctccttgccgactgtcaggccgtccaggccaaagaagatcccctctggcttttcacgctcatcctctgggatcagctctgcctggccaatgactttgccgttgtcactccagacctgaccgtttccatcgactttcttgccagacagcttcttcggattcccagcaacaatcctccccaggatggtgccatgctcgtcgacaacattgcccagcttgttgactgtgcccccttcaagggcggacaggtcctcctcctcttcttcctcctcagggacctcgtaccgctctgcgcggccgttgacgtttccatactgatcgaggatctcgccggagatgtcgacggtttggcctcgcaggctcttgggatcgccttccacgatcctacccaccacctcaccatccgcgtcctcaatgtatccagactctttgacagacagctctcccaggccactgaaaggacccagggattctcgctcgcccttgggaatgagctgcactttcccaatgacttctccatcatcgttcagaatttcacccttcttgttgatgcctcgaccggcaacctccttcagctcaccttcgacaacacgcgcaattggtacttggtcagggcccattacattcccatgcttatttggcttcaagccttccacagaggagaaatccacttcttctggttcaacctctggttcttcccacggctctgcgcgtccgatcgtgttgcctcgtttatccaggatatcgccatcgtcgtccaccgcgtacccaacaagtcgttttggatctccctcgaccagcttgcccacttttctcccgttctcgtcttggatccagctgtcctctgccacaaagatgtcacctaactctgaaaacaacccaggcttttcctcttcaacctctattggtttggccttgccgatgacatgtccttgattgtcccagaattgaccttcactgtcaagttggaaccctccccgtgagagcttcttggggtcgccttcgacgagctcgcctacaggagtcccgtctgctctgacaatgctgccgagtttgttgcacgtcaacccttccagcgtggagatgtcgggcaattctggttccgcacccagagatactccctctcctggttcagcctgatcttcctgctcgtcaggctcttccccctctggctgctccgccgatttaccgacggcctcttggccctggtctttcagttctcctgccttttgctggatgaggtcaactcggccgatgaggtccccatcctcgttaatgatctcgccattgtcgttgactttctgaccagcaaggtctcctgggtctccttcaacaacttcaccaatggggtttccctcgttatcaagaatctttccaccttcaccaacttcaagtccttccaggcttgatagatcttgcgcctgatcattgagttctcctgccttttgctggatgacatcaactcgaccgataagatccccatcttcgttaatgatctcgccattctcgttgactgtctgaccaacgaggtcttctgggtctccttcgacaacttcaccaatggggtttccgttgttgtccagaatctttccaccttcaccaacttcaagtccgtccaggcttgatagaccgagggcctcttgcccctgatctttgagttctcctgccttttgctggatgagatcaactcggccgatcagatctccatcgtcatcgacaatctcgccattaccattaactgtctggccgacgaggtcttctgggtctccttcaacaacttcgccaatagggttcccgttgctatccagaatctttccaccttcaccaacttcaagtccttccaggcttgatagatctagtggaactttgtctgagatatccggcgcttccggaacctcgccggcttggggcagaccggcggcctcctgcccctggtctttgagttctcctgccttttgctggatgagatcaactcgaccaataaggtccccatcttcatcaacgatctcgccattactattaactgtctgaccaacgaggccttctgggtctccttcaacaacttcgccaatagggttcccgttgctatccagaatctttccaccttcaccaacttcgagcccatctaagctggataggtctagtgggacattgtctgagatatccggcgcttccggaacctcgccagctttaggtacgtcgtcggtctggggcaggtcgtcggtaggtgccttgtctttggccgtttgagcagcatcttgaaccttctgctgattcagggtatcgtcggcttgaggtaagtccttcttattcgttgcgcccttggcagccttgagactgtcttgtggtttcttatccttcgcagcacctgctttatccttggctccttttgcgaggcgtccagatggagacgcagctgctgcctttccgcggctgggaagtgaactcagctccgagcccgacccggatgcatctgtcccaggcttctcaacctcgggcgcttgcttctgtctttgctctttgagcttcggtggtgtaggcttggcctgtttggcttgggggaccttctgtgtggcgctcttcgcgggcgccgacggggctttacccaggggtttcgctttcggacgtgctggggttgccattattttggttgtatatacaggattgcgtgttcgaaaaagggttttcttttttttatatagcacgtaagctgtcctaatgttgctttctgcgattggcacggtagtaactcgatgttttaggtatagtataccaacgcgccagcatcaaagtacggcgaatcgcgataaatatttttaaagtgatcgacaatctcccgatcatccagatctcgccatcaccatcgccatgacgatcccagtcccatcacctctgcgtcagtttgtcgcggcgccgcactggccgagccctacgacagtggctgtatgcacgccaatcggtacctaccgacgacagtatatgacaggcgcgatgacagccagaacagaaacaaccagggatccagtcgcacgcgcacagtcggtgccaccctgctgggacgaggtcataatacaggagatatacgaggagtggggggttccagacccacagagactacgcggcttgttcaaaagtcgacggattaggcaaatttaggagagcaagtctgggcgagccatgattcgggtcaagcatcgcggggaagcatcaacggcgtatagaaccgttgtggatggtggtcttagcacactgctcccagcatacggagtactggtacttgatatctattgctgacgtgggtacggtacatatagcatctgctcaaccacatctcacggaataaggaaccggcgcatcgagcgagctggatatatgcacatgatgtaaatcccacacgtcgtatgaattatcttatcgtcatgagccctgcttggtgtacacaggccgacctccaaggggttaatgctcttcatgctcaccaggccgtgcagggaccgtcacatatttgcaggaagacatcattcctcagtatattgattaggaactgcatgaaattagaaatggtctctaaaagtagaaacttgccaggccaaactcacagcaatgccaacgttaaatccccccgtatactagctttcaggtcaacctcgatgtcgaggtttaaatcaagtcgtagtttgagcccagtgtcctcttcctttccttttccctgtgcttgtcctccctgttgtgctccttgcccttgtatacgcccaaggccctgtgcctgcgacgcgtctttgttggacagctgttgcgacctgttgccttcgtatggttgcattgctttggtttcatcttgaacatcttcctcttctgaggcaatcttgggtttttgttgctgacgccgcggcctttgtcgcactttcgttggtttcgctgctttcggttggcgttggggtgcacgctcttgttcatcatctgaatggatggtgtagacatcgtcattctcgtcagcgtctccttgagctgctttaccagacatattcactgtaggactatgcgaggagcatggaatatcagcagtgttaagagaattgcaagctgtgcaactgcgcaggcgcctgtgtccgcgatttcagctcgcagtagaacggttcaatccagctgaataagatgatgctcaccccttttgcctggtaaattagtgctcaagctggctcgccactggaggtgttgtcggtacttttctgaccaagaagaccatgcgtctggccttaatcgacgaagcaatgacgccgtacccatgcaggcatcccagactgacaatataatgatgcgcgttcaatgacctgccggcctaccgaaccggtattctcatccaataccacttttcctagttgctgcagttacgtagatgtggctgagaccagtcccgaagcggcgcaggcgaatattgatagatgccagccttccacaacgtgtgtgccagtcccactgtttgtagtttgccgtttcacctatcagaaactaccggtcctgacatcaatactactgcatcaggctatcacagctgccactgctgctgggctttggtgcttgtcttggggcgaattgccaatctacgtaagtatagacatacctgaagcgtataccacagaacatccaagagctgtatcgtgctgcaaatactgcgtcccacaatgtcacagaatacaaagaataatcctacagaggatgcaccgaccgggaatgcatcccccacccccgcagccaagcgcaagccccctaagctcaggcaaaagccacccgccgaggcagcagcagacgattcgggaacaccaggaagcacaggtacccctcaacctgaaatgaacgataacgttggagacgagaagggcacaaagggagataaggcacctgcagataaccaaacgaatggggatgccccccaagacgaagcccagcaggatgcggaagatgaaagcccgggggatgacgaccccggcgaaggcacagcagaggaaaaagagcaaccggaagacgacgaagacgatcctccaccagaatcaccgccaactgaagagataggttctccagagccagaacctgagcgggaacctgatcctcccaaacgacactaccgtccgaggcggaccgtcacgcgtgagcgtgaaaggaatgcacccccagaggtctggggtaaacacgatcaggaccaatccggtcaacaactctcccgcctggctgatgttggacagaccactgaccaggttggggagcttgcacaggacgtcggtgggaaggccgtgggtgaggttggaaatactgcaggcaaggctctgggcagtgccgttggtggccagtctggcggggaagacaagggaaaggaggagcaattgagactgcgactggatctgaatctggacattgaagtccagctcaaggcgaagatacatggagatttgacgctccagctactgtgagttccgtgcatctagttgaggttgtatagctaacggtgtgtctagtaactaagcatgacggcctcggtctagtatttattctgtacttgtatccagtccgtctctactcgtatcaatgtctttttcaagtttgtgccattctacgagttggtgtctgaagggctgtgtatatagcaatctcaagcgacctatcatgaatgaatcgaatgtattcaatgagagtccgtgtacaaaacctgaccatcagcactattatcaatctgtattgagttacgtactaccagacagtaccgttctcgcctcctctctgccagtgactggaatccgttgcaccccttgtacaccctgtgggacaaggcccggatcgatcaggccaacctggcaaagcacgctcgcttgatcccagtaaacattctcagaagatattttgccaccgataaaacgtgtaatgctgataagaatgacctccacctgcttgtgtgttggggcaacgcctggtaggatccatggcatctcctggctgtgcttgaagctcatgtacagctcctcaacgactctgtctgcgcccgtggtacgggaaagaagccttaggcgcatcgaggtcggcgcgttcccaccaaagttattttcgtagaagcgacgaaggtccgttccgcccgacgcgccctgtgccgttggttgaaaggtaacagagggggtctcgtcgcctgtatagcagccgatcgaacttccgggcttggatgaaaagtatcttgctgaggaactcaccattagcgactggacagataatgtgaccaggtcaaggaacatagtatgtgaaatgcataccttcctgggcctcatcccatactgcctccaaatcaacctctctatggaatgccagctgcagcgccttcagcgaccgactccacgccaactgcgctggaatgtgattatattgtttcatgtccttctctgcgaaccctggcagagatccactgtacacatacgcctggtaccccacgctgagacgatctcctgtgcccattgccgaagtgatacgtctgacttctctttggctcttatgcgccctcccagtggacggatataccacagtgacatcctgcgcggcaaagtgaattaggacacgaactgacgatggataggcaagctctgggtcgatgatcctcgttggatagtaagctatcagtgcgcagagcttactggtattcggcgaatggagaaaatgctccaagcagaccgcggcggcctcgccgaaacctgacagaatgagcgctgcattgttaaaaggataaggagacacacttatgatggcatatgattcactgacgcttaatcccgtctttacgccctcgaggtcgtggataaaagctttcttgtccttgacaagcggaaggtatcgaacgtcaaacccttcgagactccagctgcggagaaagctactgtcaaaattgtccctgtctgcggttatgcagagacgagtagccttcttagtcgagacgaaaggtgccatttgatctaccgtatacaagtaacgttgtcgatactcccttcatggagcggctggagaatcatacaggactgccctcgacacttctcatcctcaaaccccgtaaaggaaataatgcatgacgaacatactgcagatccccttctcgaaatagcccgagtcacgttcaaagccacaagctccgactgatatcatctacgccaccaaagaccatttctgcgccggaacaggctagactgccactggagctgtccagcagaccaactcggttttggacacatgtgcctcgattattctttaatattcttgaaacctattaattaggaaatgccacgtcggtaccataaagggtgattaacgttttgtgcaaacgctggctgggtgttctcaaaccgctgggcaggggtgtggccaagccggaatcgcgaatatgacagaattccaatgctgattctcactgtctattatttctgtgccagtgaaatctacaatacctgtgagttcatatcccagactagatagatacagaggttgaatctaggtgctgggataccctcccggtgcactcaatagaaaagaatctaacaaattgatgcccgaccaagttattacaacgcgaaggtattttcaaagtaatcaataaatccattacagacccttggctacccgtaatttactttgcccgtcgaattaaagacgggaagttggagaagccatcctcctggcggattgtagcgagcgcgctcactggctgtacgtgtcctcggcctcttgaagagtcatgtccagactgttcttgttctgggtggcatcctgagcacaggttggcacagtgtcgatgataccaaaggcaagcgtgtcaacacctccctccaaagcccggagcacgtgtgcaatcggttgggtgaagggggtcaggctcagtaggccacgcttgccgatgacagtgttcaggagttcctgatgcaccatgacgaactattccagttgttagtgccgtccaatggggtgggctcgtttttgggaaatcaacatacggttctgaaagcattgcagatgccctgctgctcgctatcactgtaggcaggggggctctgtctcttctttccaacagtctggttcaaaatattagcaccttctctccaacgagacacactggcatattcatgacgaaccttgacagagcgcttgtttccaagtatttggccagggtccgcaacaatctctccaatgtcatcaacacactgctctgggtctgcaacatccaaacattcctggcgcgcccgaagagcgcgcttatctcctaggatctcactggggtcctccacgatttctccgaggtcttcaacacacttctcggggttctcaacatccaagcattcctgacgagctttgagagaccgcctggatttaccaccgttcatggaagtgatatcatcagtgactatctggattatatccttaaagtcgttgatcaattgctaaggaagaagtaagcacgaatggccttataccagcagcccttcgggacacatatacgggactgcgtaacatacagggccagtgctgaagaagtttgtgatggatatgctcttggcgatatcgttggtttccgatgacttctgggtgatctggtcgatattggcggtcatttgcgaagcactgacctgggcagaggcagaggcagccagacccagaagtgggaaaatggacttgaagtgcattctgacggtgtttatcaagggtctggtgaatcaaatgaagagactgaatcttggaggttggtgtcttcctcagaggccggatacttggggctttatatagttcttcgctgccataatttccaataccctccctctttaccctactcaacaaactgacatgagcaaacccacaatttccatcgctcgaagagatgcaaagctattgaccctgctaatgtgcggtgatgcattcgagccgctgtatatggaaagaactctgggcgatcatcgccatgaagccagacccagcgaagaggaccagcaaccatgttaacaaattggagaaagagtgctccagagctgaggctgatcatcaccgtctggtcctccctgaccagtgcatattgaaaaaggttcctgcagccgatcattgttccagcggagattaacctcgtggagctgccgcaatatgcaggcctcactggccatggcgaggcttggcctggcggggcatgaagatggttgggtctgccctgtccaccactccacatgagtcaaagcccatttgggatgtgatggcaatgcttcagtgttgtctcgtgggccctgcggagcggctatcacgtcccggtgttcctagtggcgtagatccagttcggcggcacggcgtgccttgatttttgcagtgatcgactgccaccgtatattcaagctccacgttgccttcggtcatggcattagtttactggataatatagaacgcttctttgatcatcccaccacagtcgatgtccacttcagctcgccgccacgggctggtagttcatattcctaaatatttggccatcggggtccaactcgtgtagctggctgtatcatgggggcgttatggacgtattgggcgattgttgggacgtaatcttttcaaacgctggttcacaccgcttgtattctctggggtacaattagggcttcaattcgaacagcaacggcactgccagtggagctgaatccgaccaacttaaatatatggagatcaatcagtggatgaaattatgcatggcctttccttcgctcctgtactgtgctggcaagcggagagtcgagatacaagttgagcatgacgtattgatatttatgaggagaagagtaaataagccatttatttgcattaacatactaatttccatgacggatgagagtaccccgaagcaaccgacggtggactaaaaggtagccagcttatccctcacgttgatcttagtcttgtttatctcgagatcatcgcggaacttgactccgttctggaatacgatggcgatgtccgacccgccaaataggaagtacgagattttatcccctttctgcacgcagtattccttctggacgctcatcgccacggacgagacctgggccattctgattagcaggactgcaaccttgccatggacgacagtgtcgatgatgatcaggcctcgagtctggcaccactggtagcccgcatcgtctggggcatccagcgatcgaaactcaaccttctttttgtggtgccttcgggatatctcggtctcctcacgagcgaggccccggtcagccgctagccttgcaccatctcgtttcttggttacttagaggtacacctgatcttgaatgtgcttcacttggattaccttgccgtttacaggagcgtgctggcggcggtagtcctgggacaagagaaacgtgtgcatcaggctgccattgtcgaaatccgggcctaggcgctgaagcagctcgctaacaggccacttgattcctttgctgtaatagcttggttctcaattctgacgagtgttctcctcggtgtcccatgaaccacggaaaaatggtgtcagcggcgtgcacaatgagcgaattgttatcaaccccagctatcggacgggttgatgcccgcccacgtacgcgagaagaactcattgaatgaaccacattcccggctgggcggtttatggtaaagcttgatatccttactatagataggcttgttgtaaaagggctccacatgggcagcagactccggagtattcatccagtgtcgaatctctcgtgccaaccccacgagccagtaggaatccacgacaggtccgtgttcgatgtctcgggcagcaatggcgtctggaggtttcggacagacggatgccctgaacgccgagtaaaatcaaataatactctttccatatagtttcttaatcgcataaaccggagttgttccgctgccattaatgactatttgatattagaaggtcttttattttattatttggaatgtgtaagcagccgacgcgggacgagcctcccgcagtgccaagtccgacggccactcagggcgcgccagtggggctgccgtattcggaaaggcaccacaaacaggaggtggggggcactctccaccactcagtcctcattcctgtccactgccagctcctgaatggcacgggtcggtgcggagtccaggcggcaggtcgcagaaggtcaacatccgagaccacaagtaacccgagaagccagaggatgttccccgcgtcggatatatatttccaccacatcaattaaccacaatacaaccacgttccaaatgacacagatacctccgctcaacatcgcccagtcttcccagagtgtcaatgtccatgtgatagacacgacggtgaagatcgatggccccaccgatttcttcctcaagcctcgggtgggcaacatggatcgcctagttgcaaacgcattcacgtttttaatcgagcatcccaccaccaaacagaaagtcgtctttgatctcggagtccgaaaagatgccaacgaactgtcgagccctttctggaagggctttcgggtgaactttgttatcgatgtcgaaaaggacgtcgcagacatattgcaggacaacaatatcgacctcacctcgattgatgccataatttggaggtgcgcagatactctgaccggctgtttacctttctaactatgaaaagtcatcgccacgcggaccacaccggggacccgtcaactttccccccgtgcgtcgacttgatttttgggcctggggcgccagccgccagactcccaggatatcctacgaaccaaaagagctcgctcttcgaggccgactaccagggcaggaagctggtagaaattacacaggataaattcgatctgcaaatcggtgaattccgagcctttgattactttggcgatggctctttctacctcctcgatgtccctggtcacgacatcggccacgtttgtggcctcgccaggacgactgctaacggcacgcaaacctccgaagacgacagcttcgttctcatgggtgccgacacttgccatcacgcgggtcaacttcgtccttcagagttccagccgctaccatcggagatccatccgcacccgaaggactcggaggccatgccggcgccattcgccagtacctgcttgcagaagatacaccccaagggacagttatatcacagttgtccgttttacgaagtgggcgtcttagagaatggcttcagtatgtcggagtcgcctgaagtcaccgcgcagagcatcgaaaaaatgttgccattcgacgccgcacctaatgtgctgcttatccttgcacacgacgtaactctacaggacaccgttaatcttttcccagccatggttaacggttgggaagacaccgcgttaaaggacgaaaccaggtggcggttcttgcgagattggagcactgctttcgaatgatggacgagatgtatacatattgtcttggatggtaaattcaggctgatagtggataattatccgtgattgaatgtggcttatatgttgttctaccagtatgacgaagcagagttgaataagggatgtttggtgcaccaaatattagagagcaggaactggcaacacattgttaaccctgcgaggctgatctaattatgattaaagataacgtcgttttggtagcaacaaaaagcagttcctttttgctcaagattcccagttcaaaccattcgcagatccatgacctcaaatcgccgactatcgctgctcaaacgtaaactggacctgagggacatctgagctatcaggtggcatgccgaatgtaatattccagaattcaaaattactgccaaatatcagcaaacagtgtttaagaaaaagaagtggatacttactgaatagcctcgcaagaacctcctagcaggccacagaacgatatctggggaatcggatcgacagtgccaccaacgacttcaatcttcagaccatccacatcgtcgaaaccagtaatatctctcttttgaccgagcgggttggttgcgagagcgaacgtgaatgtacttgaagagttcccaagcgggtaggtgaggttcagggtatatggagcaacatcggctttcaatgcagtctctgtgggatacaggctgaagtatccaatggactcgtcagatcttgcccactgaacgacagaagggctgaaccaggagtaggagaaatatccagacatcgagtactaaggacatctccgggttgagatccgctctggtgaccggtctccaagtcagccgcacccgtagtcgggctcctttctcgagttgagacattctcaagctcaatgtcaaatatattgcgagatgttgcagtatatcgggagtgatctttgaccggagaggtggggatggctgttgctacagcaagaggtttggagggtgtgggaggtgaaagtggaaggggaataggatggagctgaggcccggaggacacattgtataacgtccagccggatgatgacgaggcgcgcgccggaggtttaaaaggcggtggagggttgtaaaaattaatgttatcaaggtcaatatacatgacttctcaaggtttccagagggattggtaggaagatttccgagcggcttagcgcagcgggaaactgatgcgggaacaaagtaatgaaggacaacttgctggaactcgaacacaaaagcaagcatgtgtcctttatagataaaagaacagaatcatcggaagtatcacgatatcagagcaaaaccggcgctgtcgaacaagaattcgaaaacatggaagtcggtccccacgcgtaggccggaagtggcgtcaccctgccatatccggaaccaatagggaaatacacgagatagataggcagaaagcaagagatcacacgacatcagacacgcagtctgtggaaccgtcgcacttccgcggcagaaacgcacgttgcggtcgaagaccgaatgtaacgtctcccaggccagcctgccaatcgttgaaagcgttgcgttgggaggagtgttggcgatacgtggaacgggtctgccacgtcgttctccggacaatgtaggacaattaggtacatgaggcatttctgctattggcgtacgggcttttctgtcacgggcagggaatgaggaacactgccaccatctaacctcttgagatgcaaacgggcccagcgcgcagatggggaccggccgtcgaataacgctgagttggcccaaccggaatcttcatggggactgtgcacccaggatagtaggtctactgcagtgatcatctcgtgtcttccagtaggactggcgcgcccacgactcgacatcagccagcacagtagcggaatggcctggcgccgcggacgcagccagtcggggtcgccgatggaaggggaaacgagggggaggggggctgagggctcatttccgatgtgacagaaatcaggaggccagtgggccgcgcgatccgtgcaaaatatggcagcggcgagggcagtagtggacgaaagagggagggagcattgaagcgacgcaccggacgtctttatagttgtcagggagcagcgaaggcggtgtgaggcggcagttccgtttcggggatggcgttcggcactaaaccggatatgagacgcactaaaccacgtaggggccgagggagacgggcgctaaacctgaacgaggggactgccgaaaacggccgccctctggtaaatgcgaattgtccgagcaactaattaggatacctcaagtctagctactgagacggtccctgcaggcagttctagaaggtgacttctagatctagcgactatttactacttatttcctttatggtttcaagtactacttcagtaatccttctgcatactagtttaattctctagtttcaaccactagagcgctccctagcagatattctggcctatctaggatctatttggaagtaggttcgaataggaagtctaggtatcagggatataatctagttctaggtggggcctagatctagcagcggtatttaattggtatattaaatatctgaagaggaggatcccctacctgtatccagcactagcctgtatttttctggatttttttcttttttttcttgctggctttctaggcgacctagatactccaagcagtattcctattgatttaattatttaaatttaaattttgatatttatctttaaattttaaataaatagatcagtaatattgggcggaatcaatctactagctggtctgtgcagcctggttttctagaatttacccttcccaaaaattctattggtttagtagttccctgcaaaaattactatttaaaattatcagctttaaagctgttcttttaaattcccccttgttaaaatatcctgtattacccctactgtatttgaaagaggaggaatatatatatctttactatctacctgcctgcctgcctgctagttctattactttaaatctatttcttttaggtttctagtattattctagctctaggattatggattctaccctgcccccatacctagtattccatgaatcctataggtttattgcatgtcagatccatcaaactgccctacatcctaccaggatccttgatcatgtgactcaggatcaccagggtgaatctatatttctagaaaatctagaccttttacccctagagattattcatcaagaaattcaggcatggcagccagtttaacctctgaaaggtcttctaccacctaggaatgggtttcaatgttctatctgcagtcatattcgacttacagtgccgaccgctatcgccttccatatcgaacaacagatagaagctcttttgaaccctaatcacatgatacgctagtccatatttggttaagttatatttcaatatctgtttcaagtctgactcgtatgacttggaacaagtaaattacgaacttgggtatctgtacatttagtagtacagatccaaaacatcaggccaaccattaaacaggtatcatctaccgcacgggactctgagtaaattaatcgtatctttcttgcatcgtccgtccacaggatagatacattcaggcttcggttacaccaatgatttcgccgtagccttcttacgttgacgctgtgatataatgatccagtttaagtcatacagaagataaactgcagtgatgtagccattttccccgaattccattacaggcatgcaattcgtgcagacttattatttgaaaaatctagcaaatttcttaatagcccgccgtgccgtactagcgttgagatgtgcggccttctcattgtttggcagtgctcgctggtacatctctgcctctttcagcttcccttgatcggagtagagaacgccaaggttgttcactgtatccagagtggacgtatgatctggaccgagggccttctcctagcctaccagtgctcgctgatacatctcttctgcctctttcagcttcccttgatttttatagagaacgccaaggttgttcactatatccagagtggacgtatgatttagaccgagggcctcctcctggcctaccagtgctcgctggtacatctcttctgcctctttcagcttcccttgatcagagaagagatttccaaggttattgactgtgacgagagtggacgtatgatttggaccgagggccttctcgtagcctgctagtgctcgctggtacatctcttctgcctccttaagcttgccctgatcagagtaaagatcccctaaaccatggaatgcccccataactcaatattgtcaactgaccaatctagatgacatacataattggcgtgtagaagaagccgttgctaaagctctaaatagtccctattacttacactcggcacagagtatccaacagatatcagtgccagctcattaagctgaatccaatttacatttttgtttatattggcaatataaaggcaccaatcctgtaccactaggtatatcgcatagcttccttcttgttgcttactcttaagaagagagaatccgataagagactttataccgattttaaactcaagtccgcttgatatagcctttttgagccagtccgggacgtttgagctgtgacggccactcttcaccaactcgtaccagatatcacgattatcgaaataagcaagtagcaatagaaggtctactaagtttgggtcacgcttctggatctcaagatataagatcatccatatttgcagcatattgccttactggtactgacatccgggatccgattgcagctgtagctcagaccaagattcttgatagaactgcaaatactcagtgatgctggttccagtttcacgcataaacgccccggccagaacaatggctaatagcagtctatacagacgattagcaagagcaaggacatctacatatattagcatatcagtaacatctattcatcaagtgccacagtacctaaattgctatcaagtttactagtagtgtttcttaatgatacaccactgctttgtaggagtaattaaattgagctataagagtcaagtctacgaactgggaaaggctcccctagctcagtcagcccttaaagtcgagaagtgataaggatagagccatgatctactttagggaaaaattccgcaatatcatatccatcactaatagagctatcgaaggggtggtatcgatcgacattatcaaaaatgattagccagcgcgagttaccatccaatccaagccaccgcaacatttatctggctcgttgctctacatcctcgtcattgattatctcccggtcccagtactgttctggtaatcggttcaaggcaaagctcaacgattgcaacagcgcatcgcagtccttgccatacagccagaatatcgccataaaatcatctctgtaatctcgcgcgaagcgaatcgctagctacatctttcctattccgccaagcccgtgaagaattgcaacttttcgcgacagtgaatctgtcggttgtaaatactgccacagattgtctatctcctcttgccgtcccacaaaatttgcaatcacagacaatgcggtcaggtctagagggacattaaagcggtagactgcacacagaaatttttatttagtcatggattcgaactaggcaaggagtgatacagattgaaacttagaaacccttactatgatctgctagagtgtctcgtgctgttggagtagttttaacctaatcgatcggaaccaccaagacaagttctttagcgtaggctgctaccgccattgccgcatatccttgccattccttatttttgtgtgcgtccgcatagtcacaaataccccggataactaaacaaggaaagtcattcataagccccgccgcttccatttccacacagtacactcccaggtcctgagccagctagtctcgccgtctaccgtctttcactacctgatttgcagacgcaatcagcccatagtgaaacactggttctttatggtctcgtggacgccttggcttcaatttggaccgatcacaaccgatacatatatcagatactccgtggtcatagtctatttcgtataaaaggtcctcttttattagtcgtgtaaaatttgcagctatacgcagcgtcattttagctcagacctcagaaataaattcaagaattcgactttcttctgtgaaatggtaggcttgaagtatagcgagggcagtcagcaggaccttagggggccggttaagcatccctgtccgctagaattgaccaccacttaatactttaccaaggtcgtattagatcacacctccagatgtgtctgttggttggctcaccacgatatcgccaagtcgaacgtctgcgttaccgtttggtactcctccaccaataccgaccatcagtccgaaccggatagagtggaaactcgagagcaattgcatcgcgaccgttacagctaatacaatgccatatgcgccacttggcaaacaggcaataacgatattgtggtccccgatatttcccagaatatacgtattttgatccgtcggcgggcgaggcagacttaggtatattacgtccaacatcagctttacggccgccatctccaggggtaaagcgcatatccacccgaccgtgtaatcgtcataggatagagtggccctggctgccataatagaatatcaaatggttggcttttagagactgagtacgctattattagttcataagaactgcgagacaaaaatgatatcgaaccccagtctcacgaatggatggatgccgtggttgttgagaggaggggcggggtcggcccccagcgagactgaggcgaagtactatcacgaccaatcattcttatacagtggagaagaaattattaacagattgcctgtttgaggaatgccatgtttgctcattttacatcgaatattccagtcacataggcttctagacccctgtaactaccatacgagtatcataaaattcgtacgatttattcctggttcggtataaaccagataatttacacactatctatatctagattagcgcatcctatatacaagttatgtgaccttcctcctattgagaacccagtaatggtctttggaatattaatcacatgataccctaatctagatatagttatagctgtatttgaggttgtcgttccaatgttgaatggtacatataatgccaaatgatagaatacaaaattgaggaagtcgtgtaggtattattacagccccaagaatactcacagcccccacgatatttcccccaaaacgactgtctccattccagcaccaacaacgccccagcccgcttcaatatggcacgtaatctcaaaaattggcaacgtcaatccattgttcatatgacacgcagcaggaagaagctgaccatttcacaaatagccaaggtggccaagtgtagtaagcgatctgtcactaacatacgcaggaacttgcggctcttcggcagccctcgatccccatcagtccctgccggtcagccatcaagcatcacttctgtgatgctagataccctttgtgatcacctcgccgaaaagcccggtttatatattgataagatggccatttttttatgggatgagttcaacattttgccatccccatcgagcgtcaaacgtgctcttacgcgagctggctagacgaggaagaaaattcaacagaaagcgaaagaacagaacactcaactaagagatttctaccagcacaaactgtccgaatatcgttcttaccacctggtctttgttaataaattaggatataataaacgggtagggtattagcaaactagatggttactactaggcgtaacaccagtccaagtatctaagtttcaccgcggtcaatactattagatcctattagcctatatataggatagtattattctatcttatatttttaagggattaactgatatagtattcttcgaattgtttataaagtaacttctctagtactatagaaagtggccggaaccgaaatcggtgcttgtaatggataatgcctctttccaccactcagaccgaatcaagcagttgtattctgatgcaggtgtcaaattgttgtacttgccgccttactcaccagatttcaaccccatcgaggaattctttgccgagctgaaggcttatataaaaaagtcctggtcagcgtacgaagcgaatcccgagcaaggttttcatatcttccttcggcggtgtattcatgatattggtgcgaaacaacagagcgcagagggtcattttcgacatacaggcataacaatagaaagggcctaagtgattctcactgtgaaaaatgtgtgcatatgttacaagtcagatagtgtgacaatacattagactaaacggtctctgtcgagaacagcgcttttccatttcgagaaaaagaccattgcgtagaatgcgcgagacaattaaccatacacataagaagaatgtgttatatactgtagtaaccaatgtatattccgttgttgtatacgccaatatctaactgcaactaccaatgtccgaagctacagtagaattcgaaatcagctttaacgccaaactcttttactctctatccccctgccccacctagatcgcgctatacctaatttgattagaagtggacctatccgattatttccaatgtacctttaggcagccgtcagaaataccgttattgaaatgtccggccaccgcttaccagatcctccccgaccctggcccagcttcccctctacctctgatgtcatcgccacaggttttaatactaatgacgagttcactttaaccaaacacgaattcgacatcctctaaacgagatatatacactgttacatccataaagccacaccgctataaatttcaaaattaatttctccttgaattaacatggtgtggcagagaaacagttactatccccatttttgtagtttaataatttttttgggggggggttttgaattaagctacatagttgtagaaataatcgattgtcgagcgagcacaagccacactgttcctaagacggccgatctcatcttcagcatgaatgggatcagcttccctcctaacattagagacttctgcgtcctcttttatcgtcgtattagctcttcggatgttttgacagctttcctgaactctgtagaggcctaattccagtgctgcgttttgaagacattccgcggatgatatcaactgacgaatgtctctatttagtctgataataaaaatcgtcagaacagtgattaaccttgacaagaaactccgggtatgtatttgcaattgactagcccaagatatattgtaccatatgaatcagggttaaggcttacagagcatgtctacctctgatgccatcgccacagactcatactcatacaacactaccctctttccactcctttgtacgataaattatcttcggtggtttattctgtgattgaaatactatcaggtatcgctgagatccataaaaaggacattgttctatttcagccgtcaccgagtatattcgcgataaatcatggaaaccgagcagctcgagcagaaccttgatatggccattttctcccaactactagagatggaccacgaagaagatcggctgaccagctcgatcgcattttatacgtttatcgaacgggcaaacaatactattgacgatatggaacatgctctgtaagccttaaccctgattcatatggtacaatatatcttgggctagtcaattgcaaatacatacccggagtttcttgtcaaggttaatcactgttctgacgatttttattatcagactaaatagagacattcgtcagttgatatcatccgcggaatgtcttcaaaacgcagcactggaattaggcctctacagagttcaggaaagctgtcaaaacatccgaagagctaatacgacgataaaagaggacgcagaagtctctaatgttaggagggaagctgatcccattcatgctgaagatgagatcggccgtcttaggaacagtgtggcttgtgctcgctcgacaatcgattatttctacaactatgtagcttaattcaaaacccccccccaaaaaaattattaaactacaaaaatggggatagtaactgtttctctgccacaccatgttaattcaaggagaaattaattttgaaatttatagcggtgtggctttatggatgtaacagtgtatatatctcgtttagaggatgtcgaattcgtgtttggttaaagtgaactcgtcattagtattaaaacctgtggcgatgacatcagagtcagaggggaagctgggccagggtcggggaggatctggtaagcggtggccggacatttcaataacggtatttctgacggctgcctaaaggtacattggaaataatcggataggtccacttctaatcaaattaggtatagcgcgatctaggtggggcaggggaacagagagtaaaagagtttggcgttaaagctgatttcgaattatactgtaatatgtatcggctgtacccatcagagctgggagagaccttgactattgcgcggacgttgtggttgatactattacgatataaattattgtgttgtgtgccgagcgggagctaacgccagacgaatggcggacctacccacgggggctcctgagccccttgccaccataaccacgcgaagaggcatagggatcgttgtaacagaaaaccttgcactaacgaccacggtccggaccaggagatatgtatgagtggaaagcaagcagacctacgcggccctggaacccgtagaactgactaatactggaactagcactagacgagtgataactagagagatttagcagattattgtacacctgtaatatactattaaggagtaaaccacacttattcacaccactgggactgaactaagagaagtgaaagataactagaacgagctctaaacttagaatgagaagctataggaagagattacagcgctacggttatagataaaggagaggaacgctctaaccttgatataattataggcggctgttacggctaatacagataatctgtaaccccgggagacctggcgataaactaataaagataagaactatatctgaatcagtacctagcgatctattactaaagtattaggcgtagataataacagagatacgttcggccgctatctccctaccctaactgcgaacgcctatattaggatagtactatcgaagacactatctacctaggatatataggttacagggattagtactactaaaattggatatataatccgatttaaaaactaagtattggccgaaacggcctacactaatactgagtggctgaccgagctaggtaatgatactagactagtaaagctacgtttcaaagtcgctgtttactatatcctaacctttagattagaccttgaaaataggaaaaccaaagccattaaaaagattgtaaataagaataatcttaccgactatagatttcgaattgaagatatagtctagctaaagaaaagagataaagaactaggaatatttgccttaataggtatctggtttaacttactagaggtagtagaatagatactagacaatagcctattaattaattaatagtatattagaagagtagaaaagtatgagattaaaaagaaataatacttctaatactaaggattcggctatctagtatagttgtataaagagataccctaatatagccactgtagcggctaatataagcgagaaagatatcccctaggtatcagagcacactacttggaatatagtagggaatatctgactagagacttgctatacctaatgctagctacagtacccctattgtaatattagataataaccttagaattctataactaaatactatgaaatcgagagtaggtatagaagctcttattaacgactatcagagccagaaactagatatactccttatctaagaactgtcgattactacctaccgaatatatataaaccacagtgtatagtaactctattaacctatagtagaaagcgatttggtttaataccgaagccttatctatattaattataaactcttaacctcctcttactaataagtaagatacaattacccagatctaatagtaattaaagtttagatagccaactcctaaatcctgatcttctcagtctatattctgcctatactaatatatacgcctaatagagtatcggcggagacgaccttatcggtaatctataatactatttaaaatgttatataagataatagtagaacctttagccttattttagctagagatttcaattactaccacctagtataggggagcaactatatttaaccttaatttattgaggacgctagggaattaattaatttcttttataattatagcctttagagctacctcccttagggaactgtaaccttctagttattaagctacctaggaagaagttctataattaactagatagtaataaacagactagacctactctttaaatactacctctactataataactatagtttagattactaaggcacttatttagaatggtacctctaagtgcaacgcaaccctactagtaagataagaaaggtatataaccgagcggactaggagaagattggaaaggagatctaggaacttttcgagtaatctagggagttagacttagccgaggcgctagatacagttatagagagacttataagtacgatagtaaatatagtcgataagtatatatctaatataagaccttccctatactctaaatagtagtttactactaaccttaaagcctaataaaaagatataaaccgcctataacgtaagtggcaagagagctatactaagatcagataagctaatatccacactatagctatattcgaagatatatactagatatagcgggtatagacttagactattaagaaggctaagatatcctattaaaaatagttcctagataaagtaggagaagggaaattatagaaggtagtaacttatataaaactacgagattcctagggctatattcctacccttaaggttggcgatatagagctagttaataatatagagaaagcttaggtatttatagactcgtttttcctatctatagtatctatataagaggaagtacctacctataccctaactgagatctagtggtatctaatctctgagattaaaatctatcgatctcttagggctgctaaaggtataatagtactaggtaaggacagtctacttacgttaatctagaaatatctctagaaatatctcggaaatattattataaggatttttatattatcgattgaactaggatattacctacagtaatagagaagtgcgcgaattatagtcttatagaagcctaggaaagtagactacttgttacctagagcttaccgcctaatctcgctacttaatatacttagtaagttattagaagcagtaatagcttagtggctatccttcttcgtagagtactatagtcttctaccggatacttagtttagaggatatctaggacgaataaccgagtaagccctcctaatacttactaatataatcgaccagatatgatatagatagaaggtcgtcttattaatagcctttaacctaaagggagcctttaatagggtaaataagataagcctagatatctacctctagtctaagggtatcctatcggtagcctagaagtagattgcgagctttataagtaggcgttaggtaagtattaggttcgacgactactagactaaggtagtatcgctagataaggctaggcttatataaggctctctactcttacttatcctctttacattctttaactatgacctagtcgactagccggttgattttcacagtagggtatctacctttatcgataactacttctactagcgagttagctagagcgctaaaaagaacctagctaaaatctagtctaaagatataccctagattgaagcctaggcctagcgaactaggtcctacttcgctatagagaagactgaactcatttatattacttataagaggaaagaatagagctagggctagcttattataaatagtaatactattaaactatctataaccgctaaactcctaggtataatctttaactataagctatagtagaaggaatatatataataagctgttaaacgagctactaaggttaatatcgcgcttaggggcttataataactctatctagagtaaatataatagctttacgaagcgtacattatactagttatcgactatatattaactatctagtataatctatttcgagataagacctatctacaatacctctatactatataataagtggcacttatctatatcctatctatatttcgaacggtagtaataactatacttaatatagagatatatatactactaatgtacctttatctacactactgtatatagaatactattactaaactatataccctaccttaaaaatatcctatatagaataccctaaattaagcctagagaagatataataatcatagatcgtttacctggttcctactattagaagccttaaaaaccataaacttagagagactataggaaatcgaaataattaatctaaccctactactaccttagcgaaaagaagccttcttagaaatcgagattaaatcagatagagagattgtaatagaaagggccgaggtagtatagttaaccgcagatattgtagtatatttagataccttaggaagagaaggctatctaggtaccgcagtagccgcgctaaataacttactagaaataatcgatagtatataagtataggttagacctatagattagtggttagtatataccgctaagctaattagggtcctatatgctattaatattattaataaggtcgctctctaatactagagaatatcctacttgcgggtaggatctactactatccttagtaatagtaagtcggccctataagtaatctagaatcttaggaataagttaggataatagattatctatactattctataagcagttaggaatactaagacctatagtatatcgatacgactatagtagatacccggatactacgaagtactagggaataacgctaccgatttactagctaaggaggcagctgtactaggcaaaacttacccgttttactatttactattatataagagagtatatattaggtaagggatctatgcccaatagaagaataaatagaacggctcgagtactagcgtatatctatatcagatcgacgatacactaccggctaaatatactagacggctctacggctctctacctagaaatcgagtatacttatttatacagttacgaaccggatactactagttattaatatatataaagactttctgatttcgagataacgatatatatatctatagtaaacgggaaagcgtttactatatattgttagattacctataattaagagaactgaggagagagctgtaaattaaggttagcgatacttttaatagtatatcgatactattaagtagactaggagaagaaggaagaggtaagattaacagtatattataaaccaagatagtggaggctgtcttggattttgctgaagtatcgtaacggtttcaaagccgcgcgctataagggcagtataaacacaacgatggtatagaggctacggtaggcctcggcaaggctctaagttcgcttaggaagtggtacacgatacatgtatataggaagatatatatagtagcggtaggctgcatatcgtttcgacgaggggtcagcgtaaatgaattacacacacatacacacacactgtaaattggcacttattctcttatctccctcaagtaaaccagcttactcacccccttggctcgagtggattcatgccttaggcaccaatgactttaacatgcttttggccgtttggtaggctgacgttcagaggtcctttagtactggtgaaagttctccggtcccctccgagggctcggaatggaggtgattcttacgagcaggttgaaatcatttcttgccagagacctggggggtgtgagggtattatgaaatgcacggatctgcgctttaggtggggaaggggctctcaactagccaatcttttcagtcctgctgactgcaatcacgtcgtatacctttgctcgccctctttaaaacgcctggtttattaaacgttcagtcaaaatttcaccgcccgctaatttccctcatgttagaagttacgttgaatgcttgttcctttaatggttttaccaaccaagctatagcaaattttcacatttaatatacaacagcggtcaagatgaccctatatatacagcccgtttattgtagtattcaagctaggagatttgccttgcttgggttcttgttgcagtaagtaacgcacccagtcagatttttgacagcgcctacagtgctggcgagtgaatcggggtgtagcgcaatccattatgcacaagtatctgtaactatcctgtctactattattaatcacgtcattcgcccagggctgaccagagccatgacaacaggagttccgttagcacgcttcagcccgtaacacgattggctctcggtggcaagtcagagtcccccccccccagttagttggcaattccggtggttgtaagctcttgcaggcagaacgctacgggtaattactaatgctaacagataagatgttggatcggaaaaacttctatccggggtttctttataatcctgtgcagcccttgaatggagtcgtccctctgcaataatcccacatttattgctatctatctcactgaaatggaattatcaatacgcccaatagcccatgtatgtttattcatagtttgttggataccatttactgacatgtctacgcaaagccacaaagtcgtgaccctcatggattttttccactagatggaaaggaccttaattccgtcacagatgaggctctggcaactcttctcacatcttctcctatcctccaccagctaggtggaacgacagttgtgcggctttcagagaccttgatcatgaagggtggcgggagtgtcatggctagtgaagcggaaatgcttcgtcttattgcttccagaaccaccattcgagccccaagagtctatcgctcatttcaggtcaaagatgatacacaatattttggtacatctgggtatattgtgatggattttatcccaggtcaaccactggatgagagctggaacagcctatcccgtgacacttaagggaaaatcgctgcgcaggttgctgaaataatccaagagatgcagtccattgagcttccacagcctggtcccactggtggaggaccatgtcggggtcggttcttcacagattatagtgcggggccttttatggacactgctgaaatggaagcttggtttaaccataagctagatatctgcaaaagtgtccatcaagccccaaaagacattccgccattccattttaccaagtttgtccttacacacaacgacatcagtcctcgaaacctgatcttagaccaacatgaacaagtgtggttgattgactgggcatattccggtgcatatcctcctgtctttgaaagcgcagcaatttcaatacagccatttttcactgatttcaatgaagcggtgttatccctcattctacgtcaccctgaggaggaaatgcaacttgattctattgcatatggattaaccaccgcggcattggcctaagggaggcttaaatggaagcggactacacccgtcacggcgaatcctattagaattagctggttggaggaaatttagttggacaacaatgacattaaaaatttgctcaatgctagaattcctcttagttgttcgcctcttaaggtcgcatatttaaaacacgtgcaattgctaattagtccacctaaaaaacaacagacttaaagtatctcattcgccccctttttccctcggggacaacaccacctagaagtggagataggagtcagggtcaatgatgtctagtttgttcccagaatagcgacactcaggccaagcaatgctggaagaacacagtactgaaattattgttagaatgaaaggcattggtcgtgaattgaacaggccatacgtgaaactatctcgggcatccgcatcaaagcaagcgaatatcatcaatgtattcaccgggacattgtggtaaccaaatgggcatagtagtgtatttccatcgccaaatgggacaataatgattcccgtgtggtacatacgcacagccgaatggcgggcaggaagatggaaagctgcttgctttagttcgtgagggatcctgaaacggcgcccagaaatgaagttgcttggaaactcatcagcagacccgatcgagccgcctacgagccgcctattcatttgtgggaaagatacaagaaaatatgtaacgaaaatctgcaacaagagatacaaatgaacggactaactaactcaagcatcaaaaataccgaaaatgaagtgaagaaaaaagaacgccgttcaacacgaaagttcctacatcccgtatgccatacccctgggagttacttgttagtccatcctcatgctcccgggattcctgctcaggaggccaagaaccgatattaagcgcatgtttttttttatcggttgaaatattttccggcggatggccccactgatcgccccaccggcacaaagcgcgtctgggaactatgctgtatgactcagaaacttatccgcatgctaagtgctttactaccatgcctaattttcacggtaaagagttcaataattcagctgtatgtaatgacagtttcttgtgggtggtgaagcctggctcaaattcaagagaagggagaccgcaaaataaaggactgtgggtaacaaagaaaagtgtgcaagatagtaaggaatggacctggtggcccgaaagaaaacaaacaagaaggaaaaatatcgggaaagtgggaaagagaaaaggtgaggctcattggtagtaagccccctggtcaaggggaagtggtgtctgatctggccacagcttgagaattcctgcttttgccgccgcaacctgggatgcgttaccgacaaactgaagttggtataaaagattaatctgattagtagtccagcatctgcacccaactcccattgcatcgaattcgtatttatgacgcccatatcgagtaaattccccccaaacttgccccactgacagtccaggggcaatatcgagaataaattgggcctgggcatcggtagatatttcgtaaggcaattctgagatgatgaggttggccttggagcctccccgaaggaccgagctcggaatagtgtagcttggctggcaatcgattcgaaccgagcttgcgggggatgacgaaaggtagaggcaccagtgattagtaccccctgccttccgatgtggaacggcgaggatgcgcttcactggtatagccaatatttgagcctggtgactggcaggcatatagtgaacgggctgaaaaccagacatagctaacgaggcaagactaaaaagacaagttagaatgaccaaactaacaatgaaacaataatacagaactcacaggatttgagagaaattgtacaatctgtacaaattagatcttgcgggcgagagaacacagatggattgtgaaggaagttgaggaaaacgcgtccttttaataaccatagattcgaaatagaggcccatgttaattgtctaaataaaactagtatacgtcgtttcatgagacgcccattgccttacccatcgaggcgggtaaattggggatgtgcacagcatttgattgacactcgactcttgaggcccgcaccacagtgagaccagaaaatgggcagcgtgacgcccgcgctacagcacttacagaggactgattttggtattacttattttagaatgcaccacagcggcggcacgagagcgggccatcggcgtcgcgcgtttttggtactagcggggacgagtcgtggtccagcgctctcaagataatattacttttctatcacacgagtcgcttcaggacatgaatttgtgttactgactttgataaacgacgaattaacagcggatcaacagcgagtcagagaccatgcctacgcgggttttatttgaggagcgcccccgcaccatttttgacatgaatatcatctgttttgactttccttgttgtatgattggaaaggtacaaggaatgcatggtgaccctgttgaagttgtgctttatgcaccaagagtttctattggatctcagccttggatctaaggaacgaaaagactaaatccaggcggacagcttaaaatgaatctcttgactctgggctttatctgtagcattttaaagatgttaaggatacttatgaggctgcgtggctacttccaatagggtggaaagaatgtatctatagagcaaatatactgaattcaacttcagattatgagagactgagaacatcatggtggggttaaattgtaggtcacgtgctccattttgttgtgcccaaccccgcctcgccaagagaagtgtaagattcgtttcgattatctcgacccaaaaaaccgcagtcgagcaatacgttgtatgcgcattcagtagcggtactagtggctgttctatgaatggacccatggcctacctccgaccggctgcgaaaaagcctaaacaggatccttgcgacaaattgaggaactggctgccataggcagaatttccagcgaaggacgatgcgcctcacatgaggctatatcgaaacgttccggtggattttcttcggcctttccaaaaggaggtatggaacttgtattactaattcccttaatattatatgcagctaaccttggccagaaaatgaaaaccagtttgatataatttgcgaacggagcctccccgcgggaaccctacagtactcttacagctatcctcctacacgaagataatgcaaatatatctcttatcaatcataacgcaaatattctactagcgagcggtgactcgatagaatggagtggattaatagaaattctgaattcgtgtatctatatagtgacctagagtaaagagactatctaacagcctcctccgtgagatttagccactgtttaggtaagggaatgcctattattagagaaaaggatagtatacaatagttaaatagagtagatagaagcgctaccgtttcttaagaagcgaaatacagtaaaacaggtatctcagatatggtattaaaggatagaagggaataagaaaatatttctatatttacaaaatccggaggacctattaaatatagatagcgtaaatctatatatttttagttattaagatattggctaagttaacgaccaacgacttacgtgagtcatctggttagatttaggaaagcgagtatactgtctaatacccctggactaaatattacggatctgaactagtaagaagaagtcgcttatctagtgctacctactataggaaacctttagggcttagattcctacttaaggaagccctctcctagtctatgggaatcagtattatattaatagatcttatttcctaggaggcttactggatagatttagaagggaataattagggtcttcgttaaaggttatctgcacttatatattaaccgataaagttaaattgaaagataggctacttatatttaaatcggtcccgctgctaagacaatgtcttttctgtgcttcgtataagaagcctgctgccggctgtaagtaccttttagtttagggttcggccctagggtcggcttcgctattaggggaaatctaatctataggaaagaagagcttttatctttccagcttatctatgatatctgaaccaaatggccctaggtactattttgcaaatgattctagagcgatatcgaaattgcagtgtagagtattatatatatctaagaatctagaagctaattataagtaaaagcgataagcgaaatggtttatatatatactgaacacttttactaaatatatatttaataatatacagaatagagagatggtttaagtgtaaacttgcttagtttttcttatattaatcttcttttaaagaggtaataaatatagatttcgatttagttactttcgcccagtaccttaataaagtaaaggtcggggtaactagattcacccgttagctctatataaaactaattagcaaagaaacctaatagtaaaataagatatcaccgcttctaatatcccaaccgctctctatttataggcagttaattgcctctaccccctaagccgctctataccgaagctcctgaaggtaatcgggtcctcctttcgaaataaatcccattatcttattcactgattttggattaatactaaggcaatatataatatggcagagtgtacctaataagaaattctaataggatacaattaatttcgcctacttcacattatccgcacattttttcgcgaacgaagtataagcctcaatggttcggatgatatccgaattccgataatagatagctgatatcgaggaatcactgtctctaaggtaattttcgctttggaataatatatctaaaacggaaactcgttagggacatactacactaggccacttttctgcagaaggaatcctattgataaaagttcgaagaggctttctctacgtttcttctaactgaggagaacctgatagagaaggccttatataccgagtcactggacggttttaaggtataggggatcggagaagatgagataaggtgatttcgagtggaatctgagatcgcacaaggacatgctgtggaacataaggtatccattctctcagtatatgctgaagatgatgaatgtgtctctctaatacagcgacgtggtaggaagcgttactagattctatctcatggacgaagtcagtcatctaaggatgacagtacgatatagaatagatggatcagcctctagagagatggcgggggaagagagccatcaccaaaattattagcaaagattaattggccgtgataggggtatgggctctcagcccatacccctgtcacagccaatcaattgcggggcagtatctgcccaggacatgagcttacatgcaagctagttcgttttccctcaccaatttgtcctctggccattatagtgacccatgtcagtgaagcccgcgtatgcaaggctagcgaaaatggattcggtacacataaatggagtgacactagtgcatttattaagccgatgcatgaccgcagtactaatctgtcgtgagtagcttacatacacataccaatggcatgaaattagattccgggaccttagagtggcgatagtatggtctgcttgagcctactttcgagcttcgtatcgcgcctctccacccccccccccccccccccccccccccccccacacccgacaacccgcgcccnnnnnnnnnnnnnnnnnnnnnnnnnnnnnnnnnnnnnnnnnnnnnnnnnnnnnnnnnnnnnnnnnnnnnnnnnnnnnnnnnnnnnnnnnnnnnnnnnnnnnnnnnnnnnnnnnnnnnnnnnnnnnnnnnnnnnnnnnnnnnnnnnnnnnnnnnnnnnnnnnnnnnnnnnnnnnngagcttcgctaccccccccccccccccccccccccccccggcagcacatgtgagacagttttatctggaggcccagattcgaatggaaagtttatgcatgaaactacgagcgacgctatgcctataatgttgaaagaatagcctacctctaccttctctgttgattcggactctggtgtctctgccgaagactctgcgccgattcgcttgcgcgtgggttaccctttcttcctcgttgacaccgagttctaaccaaacaaaactgtgcgacgttggttttttcccaaggctcctgaacttatggatgccattgcccttcaagagcttggcgctcagtgaggtgttgaaatggacaaacgttggacggtctggtatgatgcctatcttggagaaattggcagccgccttacaaagctcgcttactgttgatcaaagcaaatataatataatttatggcttgctcttgtactgatcatcggaaaggcctcaatctaagataaataaaaaggtaaagtttgaaggagccgtttcacacaaaatgcttcggtatcgatcttgaagtattccccacacttgactattatggggcggtctcaagaaaatacgcaagccctgtgatgcttcagaagatgaagcgtcaaaatgccaagtcaacagtgccagcatcaggacagcaccataactaagatgttgtaaaatatccctcacgtaaacgcgtaagtcattctcgagagaaaatccttcgtcggatcttctacttctcaaatccgtgcaaatatctagcagcatcctagcatctgggctgggattttttgaggacgtagacgtccattcccagactgacggagattcaattctcaaagagagtattgctttcaaagcaatttctgctggcccatacaggaattggacaggaatcggggtggacttctagtgttagcatatcatcgtcaccagcgaaatatgtgggtactaaccatgacgaattatttggttcaatgacaaggtgcgatcaatggtgccttagacagtagaaataggcacctttataacctgctagacttgaaacaataaacatagctgatacttgagaccttccatctctattgatgatttcacctcatattattctacaccattcgatgcctgctgttcaactgaactcatgcactgcctttcttctgcatcattctggtctctttttccgaattggatacgatccctccgcgtatcagagggagagcaaagcagagagcacctagatcaaactgtccccattgcttctagcccgtatacgcgaaccgagccagctgtatatgagcctcaaaacaccgaatttgcacataacgccacaaagcctctacccatatgcatttcaaatcgaatagagagagcagcatggactccactttgtgagtttccctgcaaagtgcgagccttttatactgtcttcttacatttcaatttccagcaaaccgaccccgagccatctccatgaaacctgatgacaacacagatggtgaaattattaagcttcctgacgttgtatttgtcaaaggcaatgtttatttacgcgaaataggaacactattccaagatggagaagggagtaacaggtgcccaatgacataatgaggacccagcgtagaaagtaatgaatagcaaaatacgtctgctttgatacacctatataacctttatgattccctctcgttactagtagcatgacgacagcatcaagctttttacaccttggcctcatctttcagaaagcatttggaatcatggcaaggtcgacgccacatataatcaaagccatgttccgtttcatgctccttgcacaattccgttcttcacaattctggtcttcggctctcaaagctatactccgtttcatgctcctcgcgcaatttcaatcttcagctgtcatatcctttgccaaactcctacactattttcaggataaatgggggaatcttacaatttggattctgtatctgttcacgtactcgatttcaataagttcatttgacgagttgcatccgtccttgatgagattgatttcgcgccaccatatgttggcaaacgcacaacattgcatggcaaaaacgacgtcgaaacatgaaatgtggccacagaatgatgttgactcagaggatgacgctgaaactcgtggccttcagttcaaggaaaatgaacaggtctacttgaagagacagaagcgaaaaggcttacaaaaaattagatatgagccaacccaaggaaatatcgtcagcttcgattacaaagattatcgcataggtctttatcgtaaggcaaagcccaggaccacctttttcacagaacagtccgaggtcatccatctattctcgagaaaaaggagcatttttcaaagcttactcggtgaagttcgtgacctacaaacatcgaaagatcactgggtgcaatattttcgtggcgaaacagcgaaagacgtttcctgctggtatcctatcgccaaagaacctcctcgatctccctccactctgatactggaaggagaagttctggcacatattgtgtccgatattaaaaactacctcgatccatcaaccgaaagattttataaaagaatcggcaaacctcaccgccgtggtttccttttatatggtcctcccgggacgggcaaatcaagtctatgtgcagttttggccggaatgttctttatgaacatttacaccctgagtctgaacagttccaatgtcacggaaagtggcctagttaagatcttcagagatctccctgatcacgctatgatcgtcctcgagaatatcgaccgggcctggggctccgtagagcaatccaaaaccgacatttcatcagttacggggtcacaagcacgtaccggtatctctctctgccctcttgaatgtgatcgatgggcacggtgcaaaggagaagcgtgttctctttatgattactaaccatcgggaaaatttggattctgctctgacgcgacccggtcgaattgaccaaacattctaccttggctacgcaacagcaacgatgatcgaagaattattcatattattctatgagccattcggggttgacaaggatgaactttcagaattggcaagcaggttcgccagtgaggtcccaagcgagatcttcacggcagctgcaatccaaaactttttactgaatcataaagatgccccggagagggctgtttctagtgcagccgattgggtgaattctcgctcaaaggaatcttaggttcactaacgagccgtttcagagcgtctgtcgcactgtacggcgtttgcgggttggaatatcgctttccccatgctaagagagctgaaaaggggtgggggagagagatggaagaggggtggtggaaaatcactgcggctacagcgcatccgactgccatgtcaaggatcactagtcacatgagcagcttctacaggcaattttatgtgaaagatgtattttccgggttttcagcctacatgaaaagattacgaacctaggaaaagatctatactcgcacaacgactttagatctttacagacaagttactcatttccccaccatgaagcaagcaagtctcggtgaggctcatataaattccagggcaatatccattcatcctagcgctctttcccaaaaatcttcttaaaagtttccgtgtccaaatcgccattgaacagggtgctgttattcttcacagacccaccattgatcatgtggagctgggttttatcgggatgcttgtctctagcgttgccgttgaatacaactgatcctttatctatttccatcccaaataagacatgtgcggaccgccttgaagaagcatctatggggagggggaatttatattagatttttctcaagtgagggcagcaaggagtgagacaacatcgcaatacctcgacttttttcctcctcgcctagaggaacgagatctgaggattgtttctatgatcagacaagtggttagctagaacatggtattttcttggtcacaactcaccttgttttccgaagacagggccatatcctccttacggtgctgagaagtgactggagggccacttctagaattttcttcattcttgtttggatccatatcaacaatgagaatgaaacggccgaagaggatgaaagtacttgttgagtgaatgtattgtagagtggactgtcatatttatatcctagggtctcgctatgagatcaatcgaactagtctcaaaatgaatgagactgaaaggactagccagtctttctgccaggcgttacaaaaacaagcctagtcaatcaaaaatggtatttaataaaatcttctgcccttaagattcctgcggtcacggaaagggttcttgtttacgactcatcccctcaccctgcgatttgaaaaaggtaaagacatgctaataggctcttgagtctcgtaatagaacgattccggtcaccgaaatcgtagtatgcgtattctcgttggtggctggctaagatggacatggttttacttgccattacgttgttcggataatgccaaggccggcatgtgccaccttcaattgatacttcggtcttttggtagaaccaccgagtctgacgatactgcaagatgggtgccactctttcacggctcaccctctgctcacctcctctgatcgtgggattcattgtgtttgtaaagtcgaaatagatgggatagaaggatttacacaacattttgcaagtgacaagaagaaccacacagacatagcatgagctggagaactggggatatcaaattgtggttagcgtatctcttactctcgctgagagtgccactagaccaaaataggcagcacagtgtctgttgcttatggcggattttgtttaatcctttttccttttctcatgcttttgctttttttttgcctggagatagaatcttctgttctgctttattgctacaatatgtacctgacagcggctcgtctcttgtcttgactccgaaatcttcttatttaaggcggtcgccagcagatgccactatcagacctagagatcgtactataagaccggatagtaggggaaagtaccccgaagtggagaataaaaatagtgtgtccacagtaattattatagtactcactcagatggtctctagggagccaacaccaacaggctttccgaggcctaagagctcagactagtacagaataggtagaggctgatcggggtttccctgtcaatgcatatactagcgctgatcattgtatggaggtgggaggtggcttgctacaatttcggtatcctgggatattgtgaaatgaggtggctgttgattgatagaccacatgcctcccttgtcaccctttccagatgcaagtttgggcatgcaagcccagactagacactcccattctgctagggatcagactgtatgtgagatttttcagctccacatgaaagtgaattaggattatttctgttagaaaataaagcgcgtcagacgaacgagtcaaggtctagggtttatgtacctatgtcaatcaaatcacaggctagaagcgacacgcgtggcaatatataagtgtcataacctcttcagatccaggtttttttaccatactcagctatgtcggctgcaataatcaacgccggtaccccttttagagtaccactctagtcccgagccgatcaatgcagccagtgttgatattcctctctatcgtctgaaagaactgtttcccgacattcaacgcttcacagctatggctgtcgtgttttcctaccaccctgataacccattggcaccaagagttttattaatcaaacgaaacggcaaggaaagctcatggggtaatacctggcagccagggggaggaactccagacgagaaggacccgactatcatccattccgctgcccgagaaagcggggaggagacgcagatttggccttcgagaattgctggcaatgcttttacgtgttctttctatcacagagatagaaagaccagcgacatagtcatcatgcgcacgctcggattcatcatcgtcggcaacgaagagacgatggcgcaacgagtctggtccagcgagatgcaagagccggtcggccaaagttccgtcgagattagcgacgagcatctcgatcattgctggttcaccgaggaagaagttcgcagcgctgctctatatgagcaagccactccacagggtccattcgctatgctcctggccaaaatggacatggttttacttgcctttgagttgttcagacgcgagaattgcccgccttcaatagatatagcgccctatggcgtaaggggaacttggaaaatgattgagctccttaggagccctcaaatgatggccacacgaaaatccagcgggttaattggagcggtcacttaccactagcaactttcccatgcgccattttgggctatttgagaatctagtgttgttactaccgattctgcatatacaaacatatttcattaccattgacaattattctatttaatgcacagatagaaaaaaataagaaaaggatcagaaacttcgatactttgtatatcctcgctttgcgcaagctggcgactggtgcaagagatattgttctttttgaggagcagcgcgagcaatgtcctcgaatgattttattgcccgaaaagcaacaaccgcgactctccacatgagatgcgcttttccttcaccccgtccatcaatgagctcccactgaagacgaacattagagtcacccccaggagatgataccttcatgaaatttaataccccggtcatcgtggagtaatcaccaagtgctttccaggaaatggtggctcaagcttccctgccctttttgtccaaacgacaggatagtaatccaccacggcacgccaagggtcttcgggaaaggtgatgctggttttgctagaaattgactgcaattttgctttatccttcaagatgacttagtagtactcacattctcatccggggcactaaggcatacttcgagtaagcattccacgacaggtcgcacgtcctctttgcttcttggtgagacgaagagccaggggtatcgatcatgagatgtccgcgttatctgtgatctgactttagcagctgcaacagcagctgcgttctctaatagcgatttatacggcataagagaaaatccgaaggtgatggttggcgtaatttaagattcttctaaaaactgcacagtccgtctgaaaattggttgtagaatattcaggttgaaagcacgatttgaacagaaagtgggcgaatggctgaggggcggaggggcgatggcggggattgaaggtcggacagtcatacggtagtgcagtcacgcggttgtggtcccgagaggtttgcatggtttgcatactcttagtgcctaaggcaacaaggacttcgctttagcatatgcgcgatatgcacctgggcatgcaagctagtcttggcaagacacacccggggaattaatttcagtaagtcttcttttcctggtctctataaatagttaaaccgcgcaggggacaatatggacaatgtggctgtcaaattaccagagatagtgacggctatgcatttgaaccatataggatgcgtccatacacgagtagtccagatcggcgtcctagtagggcatcatattgaaatatatactttagcaagtactaacctattattaaccaacaaagtaccaggacccttaagcattcacgtaggtaacgccacgccaaaatgacttagcagaagagggaacttagggttcgcgaatgggttagaaagttagtatgcaatttgcagggttggccttccattcatttaggttcgcgagagcctcctcagtgaccgctttagtactaaaaggtcgccacgccttaagtataatagattctgtggcgggggattccccccacttttggacgtcttatagtaagaacttctcggaaaacttgcctatgattagcaaatagaccacggccttattaagggcaggataagattttgcggtaggagggttcctatatagggcgtatacaatcatagtatctagtgggaagcgggaattgtttctatatacctgtcagttaaggggggataatactatactaaaagaattcttacatttttttgcctacttctttactataccgaataagaaagctggggccgaagtagtatatacactactactaatacttaccgattttctttttattatagaaagatttataaagttttcttttctcaactggtatcaggcctctcgagttacaaagtgtactgataacatttctttttagagcagtctctactataccccattgacgtttatactcaatttctctaataaaaaacagaaatagagaatatcgagtaatacgtagctttatatcatatatattattcttattatataggcgtattaaataggttataagactggtacaattaggcttttaagcggtattcgaggagcttaagttattctaggaagggccgctctagaaactagagaccttctaggtataggagtattattctaaaaaggcagtaaggttatatgaataaaggtgtttaccggtacactagacttccgttagctattataaagtcagttaggaatataccgattctagaatattaggttcattcggttcacaatcttcaactactatacttggttactccggctcctctggttactccggctcctctagttgctccggctcctccggttacttaggctcctccggttgcttaggctcctctaattacttaagggtaaggtagggcctaaggttcctagaggattggtctgattgagatttaatagtaagggaaagcttccgcttagagcttgcctaaaaacccctaattgataagggtaagtgagatatatctaaaagcttcttaggccatgcagacaggctattattattaagcggagagatagatctagaaatgcgaccttagggatttgaggttaagtcgaccgaattcttatctttacttaaaaaccttatagaatcactaataaccaagttaatatctaattccctaaagctttcacttaaaattgaataattattagggttactaccccttatattactaggagtatagtcggctcgttactatagttctaataagtatcgtttaaataagtattatttacttgaggtaatatcattagagctaattaaattaatagtagcaatttcgtctttatcaggagtatctttaactatcggctagggtctcgataaggattatcggaagcgtttaggtattatacctctcgatttaatttcctctagtattacttttattaacctctctaatcgcccaatcgttagactcgttaggctaaccgaacgaatatatatctcgttctttgtatattaggtacctaaggtttttaaagatctaggctaagtcgatatatattagtggttattatctaaatcgatagtagaattgtaagaagttatatctaagttgtttagtaagtttatatttaggctatctaggagatacttatcgaaattattaggaaaagattaattataggtattaatagatatatctagaaaataaaggtaaattaagtcaaatcctcgagaagttgtgtttctaggcttctttactagataagttttagttattcggtaggactaccctatctaataatactataagatagccttaatttaggctactatctatagctgataaagaaaattgtctagagctattatactttaccttataatcgaataaacagtctgtattagcttaaatttacttataaaggctaataaccgttttaataggtaatatcgactaaagtttataaaagatatagactatatttagaatctataatagggttaataagcgttaggtcctaagtagagttaggcctacctctttctctaaattttctctaggtaagaagttaaagctcccttattctctatagtgattagcctaaaggaagagtcagatagtataagttctgattaggtagctagcttatattaagagaaaacttgatctaaagtattttaagggtaaaagcttctaaagaggactaaggaattcgatagtaaataataaatagatttcgagagtacttagagatcgctaatatactttaggggaagaggggagcaatactaactataaggataatgtaggtactactctttcttagcttaccttcggcttactctctacttactctctgcttaccctctacttacctcctctaatcgcgggatttattatatttataaagtcgaatcatatgggatagaagggtttgcgtaacattttataagtagctgagggtataaaaggaactttataataatctaacgaattcaacctctatagttaaagtgaatgactatattctttagtcttattgtaagttattaaagaaaggaaaaacgatctttataaagtaattatataggattagttaaagctgttattatataactagtattatagactaataataaacgttaatttatagtataattatagggcgattagagcacttagtaagcgcttagtaagtacttaggaagtaaggcagaaattattcctcccagcagaaaatgtaaatataccctaggacctagttattagacctagtataagttatatagtgctatttagtaggcttagcgggtcttatcacattatttcctaaaatggttacgtatatttaacaaatgtacaattaaggcttacttaatacattatgatttaggatcgcttaataagcgacctttaactgctatcacaaccaggaaccactaggtttctactccctactcgttatatataggcaactgtcgagtgagataagagcttttgcttgctttccctgcgccacctcttgttatattaaagtaaggaaatggataccctttaagaaatattattataaaaattggatggattagttgatcctagacgtgtgttaaccattacatacaatcaactcgataagcgttaagtaactaggaagtcaatagttcttaagggcagtgttagttcttacggtcctttccctttatacgtatgtcgaacgtgaagggagttactagctaagtgttttacttattcgaggaaatcatattgcttaattaatcaattaaattgattaccggcgcatagaatggctaaaatgattgattcgtttatatatatttaaagcaaacttagccgatgatgaattcttttgcccggctgcttaagatcacgtatatgcacaatatgaaggtttgctggtgctcaaggtatgctgtagtgacgttacagtcacgtaaaaggtatggcgggcaatatgtcaataacgttgaaagtacggttgctttcacgttgccgtacctatttgatgaccgcaaataccaccggtcattgcccttctagtcttgcggggcccgcattgtgagtttaatacataaaggaccaattttcgtggtcttttcgtgttctatgattggttactccccttcgtgcaataacattcatatttattgagccctttcctattagcagacctaagttttgtaagagtccctgctatctattttttctatatagatttctcttctcccaactacccccagatatcaaggcaatccgctcaatggccgctattaaggccaccaggtccaagcatgtcacttcgaaaataaaattgatacggcaaaaacaatgccgtcgcaaaacaagtctgatgaaaaaggcatgcgaatatagtaggatgtgcagcgcagatgtgtgcgtaggtattcgcatgcgggagaccggtcaggtgcatatcttgtcggcggatgcttcgggcttttgggcttttcttacttcgcaattggtatgtaaactacatggcatcatctaccaggcggagcgctgacttaacagagctctcattacccaactccgactgtgatgacagatcgtgatttggagaaaaccagggaggagacagtttttagggagcaacgataggaaaaaaaaaacgcaactgctgtacactagagtatgcaagttatttctatccttattgcagtatgtttttgcccataaacatttttgtgaaaaacagtttttgcttttcctttcactctcttacttgctatgtcaagaagtatatcagaggctgtgctaagccaaatatcacagtagtctacaatatcattgtgagtttcatgaataaagcaggaagaggctcgaagcttgaccgggaagagccgccaaattgggggagggaaaggaagatgagccgccctgcaatagaccatatcatgagagatatacacattagagtaacaacggtcccaagcagcgatatgggtgcctgagaaataaacgtggtaacgctgagcgagttgttgcttccggcataaatattagtcatcctgctggtgaggattactatccctgggagtataaagcaccgtggtttccttgcaatagttgaaaaatatgtgatacccaagtcctgactgacaatggaaatcacgatcttttacgccattgcagtggggtgcttactgacaacgctctttctcattcgcatagccccctcctttctgaatctactcggaattttgtcgttcctcattacgaaacacttaacatatccatacttgtggggtcgctataggctgattgctccttgcactcgagcagatgccttattatatctcgcgtacgctgtaacaaatgtttttcttgttgccttcaagactccgtcaacaacaatggcaagagaccgagccggaaccctttcagtgatcaacatgagtttcctgttcttggcacatcatctaggattccttgcaaacgccatgggtgtttctttgatggcgtgcaagcgcatccatcgggctgtgggttggatgactggcattcttcttggtttacatatcatcatggcaatgataactgatcggaagagctggatacttcgcgagaagcctaacctctttgtattaattgtttgtcatcgctctcgcttaacctaccctgttagattagtagcgctaattcttcttagggctctgtgattatggctgcaattctattgttatccttccctttcgttcgccgtttcctttatgagccattccttcgactgcactaagccctggctatagcttgcatatattctgtatggcggtatctgccatccggtactctgctgccccggctgtatgtttacattccgcttggcataatgctacttgtattgctggtcgaacttttccttttcattattaggaacggtgtcttccccctatgtccctattcttgtgcctctattagatgtgatcgggtgtaacaaatactaatacagagcaaagaggtaataccactgaaagtaaggagcccaacctcttcgcattaattgtttgtcatcgctctcactcaacctaccctgtcagatttagtagcgctaatccttttcagggctctgtgattatagccgcgattttattgtcatccttccctttcattcgccgtttcctttacgagccattccttcgactgcaccaagccctggccacagcttgcatatattctatatggcggcatctaccatccggtgctctgctgccccggctgtatgtttacattccgcttggcataatgctacttgcgttgctggtcgaacttttccttttcatcgttaggaacggtgtcttccccccacgtccctattctcgtgcctctatcagatgtgaccgggtgcaacaaacaccgatacagagcaaagaggcaacaccgctgaaagtaaggattgcactcacaaggcccctacatatccaggcaggccaatacataagtctctggatacccgcggcaagcctattctcctgggcccagacacacccgttcatggtgacatcttggtcgccagaaaagcaggatgtcctggagctttttgttcaacctcgaagagggctcactgagactattcaccatcgtacagcactggatggctatacttccttaacagcatttgttggcgggccgtatggagtcagcaaatccgtagaccattacgaatgcgtcttggcaattgcgaccgatttcggtatagcaggtgtcatatcttaccttaaaaagctcctatacgggtacaacacttgcacgtcacatgtgcgccgggtacatttcgtgtgggagatccaaacattgggtaagttcggcccccgcgttcaaagagcaaaccaacgatgctgaatttctcagatattgctgttgcagcccaaccacttctaaacagcttgttaagcgatgatatcttggatgatggctatgtgggttggctgttcatgtttaaccatactcgcgctaataacgtgatacagatactcgaaatgtctttttttgtggcatcaaaccagatgatagaacatggcaagccgtttggccagcatcgccgcgcgacagttttcaatggaaagcctcggtatgatgaaattatatcagaagaggcttccgggcgaaacataaaacggctgccaaacactcatgaagaccgcggtgaggttctggttatgggtaagtccatcaccttgaataacaaaccagacgctaacttcctagtatccgcatcgcatgaagtacgagatcgtttgagagaattagttcgtaaacacctcgaacagagagtaaggttacatgagacggagtttcaaccttcataacgagaagggactaatctgtcaagtggggggagatggggcgggtggggccagcgaatgaccaattggccacagattaaatagaattcaccgccctccagaaacaagtttaaccattgcacccgatctgttcttcaccgtcaccgtaaaccgattcatcagtgtattcccccagtccaaggaacagcgtatgctctatgattctgtgatcagttcttgtttattccaatcacggcataatttaggatttgtaaacagggtgtactccattccctgatcggcttctgtttcaattctcacagtttcttagaaagcgattccgttctgactatgaccttgctgttgcgttgacgaggattttcataagggcatggcgaccggcaaaatctacttcaacgatcccatttttttttttggcgggttgggaaaactgtggccatgagagaaaaatcgtggtcaaataattcgatttattgccgtttaggttgcgacacctttttagggtcgcaaccaaaacggctcccagttgtcacctttcaggatgcgcctttgggagacgcttgaaacccctgtgtgccattgtttattttattttctaaccattcgctttcttcctccaaattcagtgtctgttcctctttacactttgcttgacagaacacgaggcaattcttctactatccagacgttcccccttgaagcccaccgttacgagaagttgaccatcaatttcttagtgtcgctgaccagcacacgaataatggtatcatttgacccagacactttagtctctcatggtgcccctggacccgatatttctgatgatgaccttgttgattgggatacctggctcacaccagaggcactccacaatgaaaaatatctggctacctcacaatgcagctttatcaacatgggaagctgtactgagcgtcagcatttactgaaacatgctcctcagcttcattcaaaccagccagaagtccctctgccatcagatgggagtttacagttgacgcagtccacagacggcaacaaagagacaatgacaataggtctccaaacgtcgagtgcaggcgtatatgcctttgcgaaatgtggaaacacagaaatccaacccatcgtgatcaacgaaaaagaacaactcaagtattcaaagcccagtgaagacaattacagtctgttcggccttgggaatcaccaccagagaagagccctcatttcaccagatctcaagcttctgaaagtacaagagatcgaaagggaaacctttcacaaatacaagccagtcgataaccggacccaggcagctgagtacgttgactgcattcaaagaatatgtcagattgcaactggcgagactatgagcgtaaaacaagcccgagacgtcgaagactgcggtgatagcttgatcacaattatacgatccgacggcccgattgcctcgtttaagtctcttttacttaactgtcacttgtataccttacctcgtgttgacttgaattcgtccctagcggcatgcgtgtcatatctgaggtacttgaactcgctcacttcttcaatttcgaagtcagacgatatgaatcgccgtcttgcccagatttggatccatattcatttcgaaaatcatgtcaatgatttaaaggaaagtgagaaaaacggtcttccgcttaaccgacaacgtcgggcaatccctacgatcgctagagattctatcttacaggcttttcatgggaaccaattcgtgccccaaaaaacagatcgcgactatttgagtgatcaatgccgctggggcgagcgttggtggaaagctgctacttgcatgggacttggtgtgatcttactagccagtgaagacttggcaaatcaaatgtatgctcatttatgccctatggaatggttttattgctgactttgaatagaggtagaagaacagcttttcagaacaaaatggtagacacgttggccatttatgttctcaatcgctacccagctctaaccagtctttatcgatcgtttgagtctatggcagtagacctcatgcttggaggtgatatcgtctcttcccaggaccagctaaacctcatccaagaggcgcccgtggagaatgaagcaaattcatgcaagctagaaagatgggtggttcccaacctcaactctctgtctagaattgcttcttcccacctgatctttctccagggattctaaggccatagttatttctagcaggtgttgagtcaaacatattatctcataatgccatcgtctctcttgctcttagaccgtagggaaccgtgtcccagagggaggggccttttccaagtcgcaattgctgactcagatttagctccaaatgaccccctaagctgaggttattggatcatatcctacaaccaatccttgtcttctcgatacgcgcgctggctggtggttgcggatggcaccaccttctcggtccctgtcctttaaattcttcaataaattcgtgataaagatcgtggtctattagaggatttcggccacaatgagtcaatcacgcagcatgtatgaagtctcttatgcggcagccacgtctcattttaggaatggcgcctcatacccatctcaatttctcagacgacattccgagcccacgatctccttcactcgtaactggtaattattggttttgtaccgtgattttctgaatagttaggacctagccgccatttaaggacctactagggaaaaatagcatttctaggttcttagtttcttcagtactcaaaattagagctctttgctgaagtacacgagctaatagattacattgtctggatgcacgcttgatgcatttactgacaacctttccgacatgattgaaagttacgggtatatgatggaacctttgaaaaccatgagcaagccaatactcacaattccttgaaagatatcgtttcctactatctctcgtaggaatagaacatccttgcagagactaaaacagaccgagcaagaagcatcaactctcctaccaatcggctttctttgcggacaagcggttgctgataaatgttagttttatattcgtctactcatgacatgttggcttgggtacctctttcaaagattcaatagactttgctgtcgagagggcggaaaggaacccaaaggcatctgagtcgacaggccaacgatccacgtcatctactcccaccattccatcatctttcacatacttctgcatgatttccatggtaatgcaagcgagagttttgatgtatacattctgtgcctgacccgggggacgttctacgcacatctccaagctggctataggggattagaataatcattatgaaggacgcaattgccacttaccgatcttgataacgccatctaggccgagaaggatattccggcatatcagagactggtgttctaatccagtttcattgaggtaacataaaccattcaaaatctgcactgtcgtgagcttaaaatacttgaagtgtcaagagccacatacctgccaagtcatagaagctaattccgcctccgtaggatagagagaccgacaccccacaagctgctccaaagtgagctggaggtcgttgacgagagcgtacatgcatccttcattaacgaagcactctcgggccgtcaatacattatcgtggtcaaggatatcatacagtcgtcgcattttagccacgtcccctttggtgtactcccgaatggctactacctgggacggatgggaacggcgagctgcaatgaacacctcacctgccagattacacctgagggtccgacgataggtgtcccagggtgattcctccctcacgattaacccgagatatgtaccttcctcgcacacctgaggtaagccaaagcattttgggcctccactcacaacctttcgtgtatgttcgctccggggagacatttttctcttttttgagttggaactactgtccaattgggtgggtgcatcaagctggtgtggctgtttgctcaagggtgcctctcgtggtgggttattcgcaagtcgttcttggtagctcttgaagtcaatcgccgtgcagtgcttgtcttgtttcgacatatttggaccagatcaagaggtgcggaaaggaaatgaggtggaaacgtatagtgcttgaaggcgaaggcctatttataatgcaattgtattaatggaactaaatctgttttgggggccacccccagcttttgcagtcacattggtcaccaggacgctgaatcagctaggtggaccctttcttctgtgaggccaagaccagtcaaatataaacaaccgatactctactgctacgtagattctgcctcaccagcacaatggacgagtctatatacacagatcctgagctgcagatcctgacagaaaggtgtcggacttaccaaggaacagccaaggttaacatcagccagattaccccccacccatccatctcgcaacatatgaacacaaaaaatgtggaaagactctgtgagatatttgacaaagaaggttgtcgaagactcgatatatacaaccacgtgagcgctgttgtgtcaagagagcatctccatgaggctcttcaagcagggcgagtaaacgccgctgacatgatgactgatcaaccgagccgctacccacacctccatttctccactggttccatacagtgccttcatggtcaacatcgattaaaggccggagaacactatttaccatcgatcgaccaatggtggactgttgacttgtatttggatggtaagccagaaatccaccacatgctttcccgcagttttgacaaccccaagacattagtcccgatcttcaaacaagccttgtcgatgaatattccaacgagagagttccaagcgatggtgagatttacctgaaagttcggcaatatcgatatgaagcaaattcacacttcgaaaatcgatggttggcgcggctgtcagacaacaaagccaggcggcttcgcggacttgagtctcatccgagcgtccgagctgcttttgactcgttactcggcttgccctccttgatgatacatggaatgcaaatcggatctcttccgcaggctctggctatttgctgcgacgaggtaaggtcgtctgactcttaaaaaaacatagatgctgattacgttcgtaggagatagttcacgcgctgactaggctacggcaatactggtcttcactcgtgggacacgatcgtgctaagatgctcaaagttgaccctcatacggtggaaacattgcaactcctggcacctggagtctcctcgaaggatagaaccaccgtgaaaggtcttgtacacagtggcgaagtcttttcaaatttcacagcatccgagcggacctcaatttggaagcgattaaagaggacagagggcataattccatctctgtatacgtttttcaaggatctctggtacctagaatcatgcgcgaactgcatcaaacggcttatcataccttccagatcattccccacgattagaggcgccacgcgtgcggccttcttgtcttttgattccacccatacgcagttcttgatacaaacatccgaagctgggtttcgatcttactcgcactcccagggggacccagcggaacttggatatcgacaactatggctctatgctatgcgtcactacccgaagttatccaaaaagcctcagaagaaaaatcctacggcgaagcctaattgtgaggtggtggagcctatgatactgtatgagatggctgtactcgcaaagagacttgggtttcagtcgccacaaattgagcagctcatccagcagtcgcccgatcggcaaattgcgcaagatgctcttttgagagcccgtcgaccagatcgttatcggtacaatagggaagaaattgaatctctgatcaacaaagtcaccgagtgcttcttgagggccgtccttcttgaccataagcttccagtacaattcgttggtggaagggaatccaagaaggaatctcgatgtggacatccgcaaaccgaagcccaactgcaagattgtcaattccttttcatcgaccaactccatggtgattccctccaaagggaacgaaaagctacttccactttggtgaggagcagtgtctactttaccttcttcagcaagctgtcaatgccctgtgaaaataacgacacagcgggtatatctccaactccagacttgccaatgtccccgctttttattccgagcaatagttcgccgcaagatgaaggagaacgggttgggtctgcgggtacaggagccgggcaggatagcaacttagagcggcaacgtttgaaagatgcacgccgagggagacgtcagcagaagcaagcgaagaagctacagaggcaacagcaacgacagcagcgaagacaccgatcctcacgtgcgggccgtcattatggcaaggaaatcgcgcgcattgattcggaaggcagccggataggagaggtagtggagccagcatccgagacaggatttggattcgttggaagtaggggtataataagtcaaaatgagcagggtcttcttcatatggaaccagccgaagccgatgaactggagcatggcgagattattgagggggatcatggtttcagcgacgaagaagaatcagaagatagtcacgctggatttgggtttgttccctcgagacctccctcgctttctgttgcgtcaaggtatacctccacggaactacaagtatcaacggtctcgcacgaccaactgtccttgatgcaacccccacagtcaccaggagagtttcgtttgacatctatggcctctttaccaccacacccagatatgaattcgcatgagaggcaacaacacctcctcgccgccggatttgaagatcacgactctatggcaccaacgggcaaggaaaacaaaatcctccgtcttgctgatgccgaggacgagcagccgcggggagggggcgaggaaaacatagccgggggagaatcttcgatagatgtcaatatggaagagcacgcaggcgaacaagagaatgaagcggcagaaacagcagcgcagctttcttcatccgaagaagttgaaaaagcactggcaattttagaaggacgtggggcatcggagataacatcgggcccctctaggactgtgggcaccaaaagtgcggcgctgcgagagagcgctaaattcaaaccatacgaccgcacgcaacagcgcgaacaaacccgcaagctatccattccgccacaggaaactctggagcaggatataaacgcactgttacgaacggctgatcaggaacagacagcaagacctggtactcaaattgatttcctcgaagcacagcatcatcctttgttggagatgaatgaagagcagagttcatggcccgtggctagtcaagttggcctgactcaggaccagcaacaggcaccggaagaaagatcaggctcggtcgagttagaaccgcagccagaaatttcgagctcgatcgatcaaaactcagaccaccatggaataaggaatgtccgatcggaacaggaagaacggtcgtctgagtctgtaccgctggacgcttcgccgcaggttcatgttatcgccgatgctacgcagaaggacactctggtagagcgcccctcgtcgtcactacaacgagagtctcccgcgcagaccgatacgcgcacacggatagaaataactgggtcagacaagttgcccgaggaacaagacaagtctcgtgagcgaggagaaggagcgagcgatgcagccaagcatcctgcagtgacaatcatgttccgtgcacgtgatgaacacggcgactggaatcgcttggtccaccaaatggtggtcgatccatctgacccctctcctgttgggcgaatggcgtccaaaaacgcgcgagaacgtcaggcaacgttttatgaccagaatctacggcaggtcccaccggggcagtgctttgatgcggcaattgaggatggcacgaacacgatattcatgacattcggcgacgatctggttgtgagtgaagaggcggtgaattcgatcgcacgagtaattgaacccggtagcgatgatgatcggccgacaaaacgccggcagtaggcgataataatgcacttgagatctagatcaaaatacttgtatcccatatagaccgtagtcagaagaccgaggacccttatggtcactgagccagggtagccgccagttgacagctataaagcccacctagactaggagccgtggacgtacgtccaaagtgggtccacgtccactgtcttccatcggtggcctcgaatcaactgtgctaggtcacagtgcctaaagccaaagccttcccaccacagcttcccaaccacggacccacatctccagactcaaagcccgcttggacgcagatccacagatccattacatgactggccttaaggcactggatttgtgtctttgtcggcctggggacaacataggccagaaaacactcttcctccatctatggaagcgccatgtccagctttttagttgaatccgtcgtaaagctcatctagcctcgatttcttggtaaacgtccctaaaggggctcttgaaccctccagtttgatactgaaggtaggactggatacgggcgagcctctcacaccaagatcaatctcaacctctacccaagataccccttttccagctagcaaatgacgcaggtagcggggctgggcgttccagtggggtcaaggagaccatgaaagaaagatgatcaaattcgtgggccttgctccaggacgctgagtcagcgtcctggagcaatcacattgaggtagcatgtagacgacacatttcttgttagccactgatcaattatttaaactcatgctgctcacttcttctgatgctcctgtatatagtgctgcctcgagtttaattgataacaccgacgaaatatctcgttatgattcaagtacggccagagtaagtacgctttcctttcctctggaggcgttatctaaaaacacccagtcaatttatctcccccctcgcatacctggaggttggccccaacgggaagaaattcgctgcgcccagcgggataatccaaagcctccggtgtcgttacaaaagttcgcccgaaataatatatgtggttgacgacgatgttgaggatatctttggccatattcttcagtaccttcacagtggggactactctgtccttattccagcagccgataaatcgagtcatgcttcatgcgaagatgaaatcgatattgcaacgcaggatctgcttcccttgaaagaaaattattttgcgagtcatgaagatatccaggtgaagaccgacaattcgatatctttgccacattgtggggatggaaaccacctgtgcaaacatcccaagacactgctggtgcatgctcgtttgtatgacttcgctactagacatggattggaccaacttggaaatgtgagtttcaacaagctttactggactctctcggaatatccgttagattcagaacaagcggacgcaatcgtcgagcttttacgggttgccaatggaataggcaccatctatgcgctaatgattcactatgtatcgttccacctaaagactttcatacgttgttccagttttctctcgttcttggaagaaaaccatcatatcagcttccacttgttcaatctcttatgtgattccctgtgagcctttattcttcatagaagggcctagagcgctgaaagtatcctgggatattgagatgagatcacgtgcccctgggtacgcaagccagtcttagcaagacacacccggggaattaatttcagttatagtatttaagctagaagatctgcctcgcttggtttccttataataccttcttcagccttccccaggtcttgatccatgattaaaaatggggtcggataataggaggcctagaaaagttagccttggtcatgtgactcgtttctgcctgcatactagttgcgacccaagaaatccccaaaatcccgaggcatccgccgataggataaacacttggcccgtttctcgaaggcgaatcccgacgcagacgtctgcttcacacaacctactatattcgcgtgccttttttattaaattggatttgcgacgaccttgtttttgacgcattgattttcttttcgaagaagagccatttgaacgagggcctgtagtcgccatctgctagtttgtagcctgaaatatgcctcgggactctagaaatagacttgctggaatgtagaattaagaaataaggaagtgagtgctcttatagttatagacttgttggctagggagtagcttttaaagaacgtctaacgagggcctgtagtcgccatctgctagtctgtagcctaaaatatgcctcgggactctagtattagacttgctggaaagtagagttaagaaatcaggaagtgggtgctcttatagtcgtatgcttgttggctagggagtggcttttaaagaacgtcaaacgttatgaaagcacgaaaagcgcaaaagcgcaaaagtgcaatggcggtttttgaacatataaccgtgccaagcccaccaacacactacctgatattggtgggcttggcacggttagtaggacttcaatctagcaaacaaatcaaaccaccaattcaagcaccaacaacagcactgacgatagcccaatcgactgcaagtagggcacaggatcttcattgccaatagagtaagactattctgaacagtttcgtgctacgtggccaggctgcccacaactgaaacactgaccattctgccttcgctcctcagtaagttgacgttcaacagcgatcgctttctctgccatcttttcccacgtgtcaggaagctcccctaattgacgaagaccaatttgcaattcttttttaaggctaatgaagaaaatggatgcaataaatgtctcccgtgtgattttgcttcggagcttcaggaattcggaaacgtagtcagctgcgctcccagtctgtaccagacattgaagccgaactactgcttcgattctagtaaggggctcattcgatgccgacatgtctattgtcatgctaagagatatttcttaggaaatcaagatcaaaatataggacttacacgtgatagtatttgttcgcaatgcccacttagctcatgaggtgccttaacagagtgcaaaaagagcgaaaattaccactatatatctctagagcaaaggcgaggggtaggtaggagccgcttatcgattggtaggtggaagagctttattggaagcgcttctaaagaaaggtcctggccaaagtaacactgcaatatagttttatataattctaaccgccgaccctatctataccgatagtattaagttaactaaggagaagggcttgagactaggtataaatcgacctttatctactattagtaataaactgatcgtttatataaggcggcgcgaggccactactcagccatccgcgatataaagaaatacaattattattacagatttgggactatatatattgtatctgtgcagcgataaagctaagatactgctaagcagaacgtttatactactagcggtttaattatatacgcgctatattgtgagctccgagtatcgatcctaactatcttaataaataaaggttattaggtattactagagacggaggatttatttttatgaatttagatagttcgcaatatatccaaatatccttagaatcaaaataatagcgagggggtcacaaggttatagattaactaaagttatcctatagactgtagaagttagctaggatcgttaatcaatcgcagagtcctaaaattaaaattcgataaaccataggaaaggtcgctcggtaagagaatacggttattattaataatccttaaggaaagcttatctataagcctctactccacttacttttaggttacttacaattaagctctatagctctaaagagatctagggcagaatcaccaacttctcagtcggatcatatatataatattgtaagatacaatactttatcaggaagatcttctacattcagcgttataatcaagatacgtaaggtgattgaaataaagttaagggctgtaggagtaccggcctacaatgccgacccttatttaggagccaatcgatgtctctgttctagtctaaaaaccggagatatttttttaccttatatagcttgtctgtagttagtatattttctataagctatctactagagatattaaattagcaatcggatttagcagatagagaggatgggttaggcttaaagagagtatagtttgtacgaggaaggtttatataagacaaaagatatagcttctagaaccttctatagactagataaagatagcagcagcttctgtatgaaggaccagtctctcttgcgagggtaactaaaccgtagattggacctcgttgagaaaagtttacgatattctaaataccttatctgtcccaaccgactgcccaagtaataaagacctgtcctatctgtactctgacggcccgtcaagactaggttttagatcgtgtctggacccttgcagatccttccgatttcttctgcgggccacaaatggaacctctgtgatctactatcctatgggtcgtccctgggatctgtatcgctgaactgtatctacgtctgtctaaagtcacgcgcggtgtttgattggtccgttgggtgctatttgtatctagggtatcattaatgtgacagtagcgttgcaatctttatgagggggtggcgatcatgagaacctaactcgtaggccatggtagctgaaataactcactatattgtccagtggactcaggtttactctagtttactctaggtttccaataagagctagactttttgatttctgttaaaaatagaaaactaataccttggatttgggggtattttcatagtgtctgtaccgataggtagtaaaagaattggtagagacaccatcagttggttacgaacgacatacaaaagtaccatttgagtagtataagggtagaattagacaaagaggactgtaattggataaatgggaggcacgtcctatagccaatatctggtacaatcgaatgtaactgtctgccacattgtccaacccattattgcggtacctatcgaagtacttcaacccttatgaaatagatagtaaccataactagtgactatggtcaaaataggcaaagtaatctaccactgcattgaggcatctaattgcaacttaagtgatatataggaattagatttttgcggcgttactttctgctcaataggtaataataatagtttaccacacttaacacaggttttaaatgtaatgaatccaggttgaaacttgagtctataggccacaaagtctcctaacgccatttcaatgttattcaaatgtctttaataccaataataagacggtgattctcgctactatctgcgcaactggttccttggtcgagacgtagccgaaaaaatataaaagggtctagattcctagcccaaaagaatcaggacttcggtcctcacactccgctgtgtcacaatgtccctctcttgcctgcgggcttgagcgtctccgtggctacggctatcgctgccacgagcccagcgatgtaagagggtgcttcgcaggataggtctgcgtcaacaacaatcctcgcaggagaccgctacgttaataagttctctgcaggagaccgctgcattaccaagctctccgcagcctaggtcctgcgtcaataacaatcctcgcaggataggctctgcgtcaacaacaatcctcgcaggatgggctctgcgtcatcaactgtgtctcgcaggataggctctgcgttatcaactgtgtctcgcaggataggcagggacatctgcgacaaaaagagtctccgcagggacatctgcgaaaccaagagtctccgcagggacatctgcgaaaccaagagtctccgcagggacatctgcgacaaaaagagtctccgcagggacatctgcgaaaccaagagtctccgcagggacatctgcgaaaccaagagtctccgcagggacatctgcgacaaaaagagtctccgcagggacatctgcgaaaccaagagtctccgcagggacatctgcgaaaccaagagtctccgcagggacatctgcgacaaaaagagtctccgcagggacatctgcgaaaccaagagtctccgcagggacatctgcgaaaccaagagtctccgcagggacatctgcgacaaaaagagtctccgcagggacatctgcgaaaccaagagtctccgcagggacatctgcgaaaccaagagtctccgcagggacatctgcgacaaaaagagtctccgcagggacatctgcgaaaccaagagtctccgcagggacatctgcgaaaccaagagtctccgcagggacatctgcgacaaaaagagtctccgcagggacatctgcgaaaccaagagtctccgcagggacatctgcgaaaccaagagtctccgcagggacatctgcgacaaaaagagtctccgcagggacatctgcgaaaccaagagtctccgcagggacatctgcgaaaccaagagtctccgcagggacatctgcgacaaaaagagtctccgcagggacatctgcgaaaccaagagtctccgcagggacatctgcgaaaccaagagtctccgcagggacatctgcgataccaagagtctccgtagggacatctgcgataccaagagtctccgcagggacatctgcgacaagaagcccctctagcccgtgcaggtacctcttcgtggtactagggaccggtattcgagtatcaagagtactcgaagaagcaaagacctgtgtactatcttgatgatatattttgtatttcgaatgattgtctttagagaaataaaatgagccctagatagaagtaaaccaattccaggattaaaactttaagattcaaccttcgttatcgagtgctgtattcctaaccctcctatctttatggtttgcggtcggctagtcttcccgccgcaatagaatatatctaccatcagagcgtagagcgaataaaatggtgagtatttgggtgcgttgtggatgtgttgactgggtgttgatagtcgttgatggttgttaatagtcgttgatggtcgttgatggtcgttgatggttgttgatggtcgttgatggtcgttgatggttgttgatagtcgttgatggtcgttaatggttgttgatggtcgttgatagtcgttgatggtcgttgatggtcgttaatggtcgttaatggtcgttgatggtcgttgatggtcgttgatggtcgttgttgaacgttgttgaacgttgatgagcgtggacgatagtatggacgaggtattgatgtgcgtattatagtatatggccaggcggtgaagttgagtgatggtcactagacttcagcaaagcccaaccaagcccatttctatgcacacacctaccgtcttggcattcataaccctactgattaatgttatttttatacatgttctaactaatctgtaagcccagatctcggcccgacgttttccctggcccaatccgggggttcaactactccaagaagcaagatatcaagtattaacggcaacgacctggtaataaaagtcatggaaatcaatggcgacacttaagacccgtttatataggaattaccaagaaaaagtcgagttttaccaggattttaaactattctagcacttagagaattcatgagcgccagcatatggttatatatatttcataaaagcagaagtaggcgcatcttcctatttaagtataacatttttaattgtagaaacccttatttttaggtttatagaattcaactttatacctaaagctagctaatttcttataataggtgtccttttttatagataattgatattgggaaaatctacactacttatgcaaatgctaagaattggtatgtttatattaggccccacgaaagcctagggaacttctaccttaggcctatagaatatctgtaggttggggtcgggttaggccttaggcttttgccggtccggaagtctatatataacagaaatattagttttattattttattctgtactatttggtatcacttgctacgatgatcccctggtatttactcagtatttttggtacacagcctccaattcgattgagctagtctaatgcaaatactaatatccctcgataaagctataattaggcaaaaaacctacaattagacctaccaagtatagatgaagtattgaataaagagcgctcgaaatgcgttttattgcttaggtaattatagtgatacaatagactgttccttgcagtcgaattggccgctttaggcggcttacaagccacttactcctactctgctgtagaatgcctacacctataacggtcgcgagtcaaactggattcctaataaagacggcgaagaaattgaggggcttggcttgaaaatttccgattggcttcttctatatgggagccgtcgcaccttggtcagttatagcaattacgattatattgcgagcctatctcctatgtagcaaccacaccgcactcaaattggcgaccactgctttctaggcgtggtgtcggagcttatgcaatcaagtgtattccactgtatagagaacatggttgcagcccgatcgggtctagtaagcgccatcttgaccagatctgggaaggacgattccgccagcatttacgacggacttggattagagctgcagcacacatgcacgttaccaatgccactgaaagcaatcacatgaatgctgatcaggggaagaaatcttagtataggctgtcatagatactcagagaggtcgcacagaggatggctccgagtaaagttgtgcagatacccaactcacccttacaaaggatctacttaaacagtaatataccagtccaaagcgcggtgtgtctgacaaataattgatgctcaagaacagtcgaggtaggggacgtagagaactcagccattccctgagaaaactgcttacacgcgatatatcagaagatggtttcagtaagagatacaggcgctcgggttaactcacctacagatgcagtgacatccaggggaaatggtctttacacacgttactcggcttagatagaaatcagatccagccagcgtatatccaaagacaccacaacacttctgacggtgctcatgatacagcgtcgtgcatgtctggttgattcattttcacttgttcgtttccgcttattagccccacccgctggaatacgtcgaccggctcagcaacacggaggatcaggtgaaactatcggacagcatccctttgctcgtgctctctgcttgactcggttataactcgacatcctactgtctccatttatcggttcgtacctgatataggcaattttcatctgtaggctcgagataatggggtcccgccttaccttctccttgtaagtagacttagactcatagcctgctcgttggagaaagtaggactcatccgccatgagccagacagaaacataagcttatctcggtgtctattgagctgccaggaatcaaaagacgtgagattcgaatcgaggataatgaagatcacctactggacgtcaggagtttgatcataaggaggctgttctttcgcggtatttgaatgccgagatacggtagtatacgcctattgtcgcttgagctttgtatcgggtagatacattagtacctaactgatatagagtcaactgagagaagggccgagacgatctggaccttacgttagcttatcatcgatgccgccagtagttatatagaaataatagataatatacgatcgcattagtagaggggagcttgagcagagaaaatgagggcgtcctgttatacaatacgagttagtaaggcttaccacttagacgagctgttatgacttacctatttatagagtttgcagagggtacgctgtgtatacttgagacgagacgattagtaagctttatggttaaataagctcaccaaatggatcacttacaatcctttttggtaaggcaatacagtaccatttacgccatattgtattctggttcgttgtactctccggccgttactctaaaagactgggctgagtataaaactaccggcattcctcggtcttttagagttctaggactgaaaagacgcgagatgccaactgaggacagcgaggattacccattggacgctaggaattcgatccataaggaacctattctttcgtggtgtttgaataccgagatagacagtggtttagcccattatgccttaggctttgtatcggtagatatattagcacctgactggtatatactattgactgagagaagggccgagataatgtgaatattctagtcgtttctcgtccatgctactagtggtcataaggaagggatagatagcttgcgattgcgttggtataggggagatcgagtagataagtcgtttactcgctttatattctactcgagtaatagggatataagggacctcctgttatatgatccgagtcagcaaggcttaccacttggacgagattttataacttacctatttataaagttcgcagaacattcgcttgagacgaaacgattaattagcttcgtggtcatatcttaccgatgagatcacgtataattgtctttatcaatacagttaccattcatactatgttgacataatgttgtatccagtttatcgcactctccggctgttacttcgaataagctgcactgggtgtactgggcaatttctgagagctaaaggtatataacgaacctatgacagaaattgtacagccgtaataggataaaacctcgcatagggacggtagaggctcatacactctgccgttcatggtataagggcggtaaggttaaggcggaagacacaatagattatgcgtcgtagtgatgtggtcttatctccgatctagtgataggactctcaacgggtatctttcacagtggtgatagctgctcctacagtggcacgaaaatcagtaatggtattagtgattggagcacaaaagttcgtaataactaatatagcgcagtagaggatgcgatcaattactcacatttttataaagaatagacgtcttaagcttctgcgcagcgaaacttgtgatcggatgtccgtacctgttattagcccgttccttctttacctaattctttactgtgtggtttgatacgatagggctatgaatagtgtataggcagtggctttatatagagtactaacggggccgctgtatcctcagggacttctggtataatgccgatattcactatcgttcattagcttgtatatcgtcgatataatccatgactcacatattttggtagctaaaactagggactaagagacggtaaagagctataactcttgcgcttgtgtattgtggttaattgtccttggttctattgaaatcgcattgtctgcataatcagtagaatttaggcaagtcaggctaagaatcacatacctgcgatacgaatattcgcgctgtctcttaggaagatatacacagaggctgtatagtagataagttcagacagctgctgtgacgtaggcatctttgtatagacacttggacccgccagcctaagtcttgtctctttaattagctgggatgaatggcagtatatctggtgggaatcatacctgtatctcttataggcactgtctagcttgcttatctacgatgtattctataaatgtcagtacagtggaatttaatactgggtcaaaggtggagaacttctcaagtgacccagacataagcctactcgactttttgtaatcaaatgaataaattgaagagtaaatttccggggggtagagaacgtatttatagacttcccggctcatcctgtcgccgaagtgcgctgcttagaaggacacgttaagggagaactctcttaattgaggcctattgaaatccatttcttctttctaccgcagatatttgcagcgatatttctgatgcctttagatgctcagcgagagagataattaaaagtggtgttgaacaacagcatgctgagttggtcaagaaacgttggctgactgttgaatcctccacgactctttaaaattgaggcactgagtatactcaatccgcaatggcaggctcgtatttcttgttctgataccttacctgtgagtgactcaacgttgaatcaccgaaaagcgcctacaatttcttactcgaaatcatggacttttttcctagcctcgctttagtatggtgttggttttgttgagctgtaggtctgtccgaccagactgcggaaagcgagggcactgtaggacgtgctcggcccatcaacccgttgaagcttgacttaccctgacgttgtcaacactcaattttcgaacttgtgaccatgaaaatacattaaataaaaaatctagtttttttcccgaatttctttgtttaatgacgataagttctataatattccatttatcggatttctgagccatttaacgaaagggaaagaggtatctgattgaaatgtatatctttaataagccttcatctggccctcaataacgtgagcttgatcggtttcccgaccgactatgcctattgttgaatatactgttagcagccggctgaaaattaaagtaactacagttataatttgactgcttcgattgaccgttatagtgattgtaaaacctagcccataatttatacacgtacatgtgcacagtctataagagacactaaggatcgatggaaattgtattaaacagacccgtgactttctcttgcagacaaaatggagtccccaaatagctcaataggccaggaaaaagaaggagatcagcaaccccgtgaatttcctatccccgatgagatagacaaatcaaaggaaaattctgaccatgtgccattggtaagtgaaacgattcggcttcaaacgctttttctaaccattgcagccctccacttcgcagcaggaagcaggaacaagacacaccattacgaccgagccatttcaaccgatcttgaaggttctagtagacctcgagcgcaacgatcctgagttcgcctttccagcagctcgacttatcggactctatcgacacctataggagtcatatatatccaagcacatcgatagccagaacctagagcaggaaaaccttgtcttaaaggaggctggtacgcacctaagacaaaagagggacggtcttcaggttcaacataacaagcagctatctcagctacgctttttcgagcaggcactggaattatcccaggagaagctgactagcgtcctcgataactggaatcatttttccagtctcaatttcgcaaggctcttcaacgaagaaagacaaggttaaaggactgtctgttcaaggcgatgtgccctacttcagcatagaaatactatagttaacttttcgaattaaggagaagtactgcttagaaagtatattctattcgaagtatttgcaaaacttagtgtatagaatagcctcccatttaatttatactcactggaaaattctgaataacaacgcattttatagatcaatctcacttatagtaacccagtatattatacacaaaaaaacttggatcaagggataccgttataggtagcgcaacttgcgaaggaagtgtcaagtaagtagaatgtggtaagggttccatacaaggccaaagggacagacggaatccagtgcctatcgcaccaataccatgccgggatatcgtatctagcagctgttcgcgtacttgacagagattccacgtagctgtcctaactcagggtaggaagaacagatgctcttctatactatcgctagatttccggttcaatcacactagtcggaactctacccagtatacttcgttagagaaagcgaaagctgacatgtagaggaagagctcgctagccgaagtagacatagatagagggtctggacccgtctacttgaaagccaacagcttgtcgtaagtggggtggaaaaggcattcgatcaagggagagccggaagtcttataacctacaggcttacctatatccaagagagtctgccgcgaaccttcggagtcgatagtaagacagagaggcggtattggtatactagggcactcttactagatagtgtgaaggtcgagatccaaatcacagtctactaatattagcacaaaactacactgaaatagcgggtacagactatctttactcaattcttccattttgtttaagactcgccgttgaaagctagtagtgaaatacaaagtatagtaggtagtaattcgactagtattaggagggatagaacgctgtaggctgagtaggaatttgatttatattctaaaggtattcttaacagagtacagagggttctggctagatactaagttctcgaatactaaacgcttggttaatcaacagctttgaaacgttgataatattactaaagccaacgaaacttaaccggcggttgtataggtcttgaaaaggaaggataatatttaaagtaaaaggtaaatatatagtagaaatatctagttatcgatgcctataagcgcccaaaatcctaagattttaccctttaatgtggtaggtataaggatcgcccgcttgtaaggctgaagccacactattataaagggcttgaactgctcgcttttgatcctatagtattaatacctacttattgcagagctgtagaaagatattgctatcgcttactagccatttatttaactcttaaagctgttactgctcttcctcgagttatatcttctcggtagatttgacgacgtagcattcctataggcaaaagtacagatctagtagtttaaggaatagtgtagctaaggtgttgttatagtgtagaagtttcatgaactctaccgtaagggaaccgcgtatatacactggaacctatgtagtattagtgatctcgttcgtttataatcgaagagggcctgactaacctcagcttcgatggttataccatccaaagattactgttagtagctttgcgtcttattcttatcttctgcgttatgggaaatccgacgctgtctcttggccggtcggtgatatagggaaggtgaagttagatggtccatcgtggcttttggaatgaaatacaagggacattgtactcgagggtcttttatagccggcaatgacactgagctgctgtcattgctagccctgagttcgactgccttcaaaagagtcagtgaacggttacctcgacggttacctcaactgttaacgctcgatctcatctgctgttcaccccgaattactcaacttcatgcggaaaagagcaacagatgaagccttgaaacgaagacttgcaggaactacctcctaatagtggttcacatgtgtaatctttgaggcattaaatactatacatcgagtagtgttcgttgaagttggaggtgatgttgttgggtgcgaactatccaaaaggtggtgatatagatattagatatttccgctccaaatattgctacacagcaacagatgttgaagtagtgattatcgctcgctctcatggaccagctcggactttttttttctttctctcatttctgctccctggcgacagggctgaaattgtttgatcggagttatattctccagtccggttccgcatgattcggagatagtagttacccgatctcctacaacttccattcttcaagtcttctatatatacaccaaagacgcgaagaaaatgtggagatatctcaaaaatttattctctcgttttcaaaggcttaagcggcttgtttaacatcgaatccaagtcttctttcccagccgatcaaaatttctcccagatccatctaccgtctcttctgaatcggaatgcacacgacgatcagccgccccgtccccagaggtacccgttaacgaagatagtatatcacaaaaaggagataacagagatctcgatcggtttttaatttgccacaagagggttcttatggcagacttaaaataaactgatcttcagttccagagcctgtaagaagagtaacgagctaggcgactcggttatgatagaacgaaagtcttcgggtggctactttcgtataaaacatgcgatagtagcgagagaacgtaagtgattatatactatacacgagtactaaattcctttattaatgaactttaagctcgttactagaggtatatcattgatacagcccaactatagtggtttattatcttaagaagatcgaaacgactgattgctacagctttggccaaccttagtatatacgggggattgccgttagatttgcccctttggatagtctcttccggtttttgaggccttatcgggatatatagctatactaacgcggtagaatatactacttggctatagatgtaccaaaaaagcgaatcataagtttccgatattagcttgatctaggcgagtatctaataaacgtaacattcggttagcctatacttttagtcgacggctatagcgtctgcgcttaaaatataacaattactttgcagctaaagataacctctgcgctagtggatatatgaaaggtggcccttagaacagctggaagtacagtactctatctatctagaagtcaatcggtacagtgtttagacagtgatttatattatctgccaactagatacaccgcttacagtacagcggatcgcctaaaacttagcccgatactagttggatataagtagggctccaggctataataagaagattttctggaaacgcgtttgggataatatgatattcaaggtatagtctttcggctgaagaaatgtaattttaagtagtacctatgatcatataggaacagtgcaatgtatagatatttaagagagcagtagtcaggcaattcatctcgctaggtccctattatatacctgagcaataaagtctagacttagttagctaccaaaaattcctatcgtattcctaaaaagaggtttttaatttataggaactctggtcgcatttgaaaggattatatataaagtatatgtagtgtgtagataaatgatatacagaatacttgatatatcgagagctctcggttccttaaagcgaatgagagcctaacacgtacatcgaagtttctataggtaacccgcaacctcgccgactatactacctacagtagcagccggctattctactgatatatattcgtcgcaatagagcaacagtgatctggaatgagatatactgtagtacgtgatcgctttatatttgcaagtgctagatagtgatatacgtagatatgctattcgcagtttatttcatatcttaacttatatatatatttaatcaactaacattgttgatttgactctggtaatataggggctgtttaatctttaggaactcgtctttagatcctggggctatctcctatttctaggaaaccaagctctacccctaggatctctactatataatcctgattgaatacaaactggttttaggaacggattggctaggtttgggagctgtcgcgctcctgggaccctcctcctggattctagagttaatattctgccttcttaggtcgtggaaagccctcacaagacaccttcaccagacctgcgcacaaacctgtgtaattcgattactcccggaaaggcttagccatagccccaggagccgcacttgaggtttcgggaattgctaaaactgtcaacaggaacgtgactttggttccccgaggtgaaagtattagaccccagaagctatgtcgggcttcctgggggctacgtggctcccagaagctgcactaaagcccctgggagcaagagagctcccagggccaatatttgcattcccagggctaatggagctgttaacaggggcgtgactgatcttgtgagggtggaaatggagagtctagaggttacgtacgagtttctggggctatgtgatccctgggcagctcgcattattatcgggtcggcttttaaaaccttgacggccactaagattgatggatatttacgcagagcaggtcgttaactatcatcagtctactatatcaagctactcggcatactgctcaaatattggctacgattggctggctagttaaatcaatcgataagcatgctttggttccaattaggaaactagattggtagattatcttctcaactctgtaaagtccatgaccctactcatcgcacctctctaatgtttttggactatacctccatcattcttaaaaaatcatcattaagttgtgattgtttttattcgtgatccccgctgacttgttctttatagccctactctaggaagcagctcgaaccgcctctgactgttttttagctcggtacgcgtactcaaccagtgatcgcgtaagccatgtaaagcaagacgtaggagagacataatggcccctagaataccgaaagcggcctggccaacggctccataatacataatcttgtagtatggaaagtggctcgcactgtccaaaaattcgaaggatgtctgaaagccgtggacgtggctggccacataaccccccaaggagagaacgatcaagctcacaacgatttcaatgcaaatgtagtagaatcgagcggtgccgtcctcttgtagccacttcggatagatcacaaggacaaacccaaagatggaaaacagggctgagaccaacgccacaaccaccatgctcacgacaaccttatccatgaggctttgaaatgtgatgtccaaaatagagtcgctcgagttgacgaggtcagattttgcgcggtctcgtagaacgaccgcaaagcgtacagtggccgagctgagaccggcgagggccagccaagtgatggcaaggaaaaggatggcaagacgcagtcgaatcacagccctggtagtattaagaggcattttgtgtccgtaaaaacagttgagtcaataacaggaaagtgagtctggttctgttcagggcgatatatgaggaagtaaacaatgaggcaaaaagatgaagaacgtgaatatctcagggcgccgtgaatttatatgtgctatgcgcttttctcggtaagaatgtttcaagtagaagcactatttctatctttgagatccagggccacggaacccgtgtccgatccttggtgtaaagaagctctaggaatgacctcgtgtattcctaggattgaccgtcctgtgaaatggggccagtattttatcatcatctccaagatgggtgatggattgtgcatatcatatttcaagtcaaatagtgatcccagaaaaagttccgatacagacagattttgccttggtatttttaccttgagggacatattatgtgctattgattgacgaacttccgaacccttccacaggaagacaaattcaattttacttcgtttctgttgagcttactgaatttgttgccagctagaggatctgcttccaaccgtaaggcagccctcactgttcgacgaaccaacacggccgatcaaaaatcaattttgaaccgggaaatctgacaaaatcctgctagtggtcaggtaactaaaatagctcaaggagctattttctatgggcgaaaaactcatatgctgttccggttcagtggtttctttgttcaacgttgatgtaaacgttgacatcaactttctcacattattcaccacccgtacatctttaaaggtggttatcagagaataattagcggatgtttcagcacgatattaccaagctattgtagaagagtccaaaggcccagtgctgctggaagcacaatgatctgaaaacatcctacgggtggtatcataccagcgcgctactagcgggggtattatcgaggataccaaaaagccccagtactcctggaagcgcagtaaagactccactggtcgtcctttttactgtggcttttcggacggctgaaccatgacgcaatagtagcctccgagatatcggaatacaactccctcccgcatgtttctattcatgaccaactccaatctggcagccaggttgctcccgggaatgcgcttcaaatcaatttgtgggtcgggcaacatgtgaatacggcaaccggattaaaaaatggaatgattcgaccgtcattgaggcaaaatatcagcatccgcaatcctcctgggagccggcactgatattagtaaccagcgaaaacttgatagcggacatatatttcatggtggatgcttctgtgcctttcttttgttttagtaaattgccggtgcagtatcatcactagaaagaccaagcaatgatcatggatcatgagctgccaaaggtatcaaagaggtccaataccccagccacagaagagcacaatggacttacatggcaaactggtatcgttatcttagatcccctttgcgatgaatccatcggctgacaatctatttcatggaggcaatgaatcggcggaaaatttccgtcgggtcgttggccaatttacccatgggaatcacggccacacaagccaggctctacagccctctgttaaccagtccaccggatctgtggctacagaggtagctacttctgttgctatctctttagctagcccagggtcctacacgttgcctccaaccgccatcaaggctgaaaatcaagactttcccccactgaacgcaaaaaagagagcagccgagtcctcatttctcccacgaaaacaacgccgacattcgtactccatctctcataaaccgggtcgttcgcaaccgatacatcgaaagagtccctcaagccttacaacagttagtattgaaatggtcaacgacacaattcaatacctacaaacgctatccgaccgcatcttgatttttgacaccatttcctccagggagtgggccactatgcatcttgccacacgattgctacagagcagatacgaagatatcatcgccagggaaaagatggaaacagacgctgtgtccgattttaattccgcaccaacacagcaagaagagaagtgccggaaatgtgctgctgcagatgaggagcggctgtatgattgaggcgctttctgtgtttataaccttgctcgcaatgttttgataacatggtccttgaaaattgacgatcgaataaaatgttggggaaccaagaatcggtatatttaagaacgtgctgagcttcaagtctattattcatggatagagcactttcaggtacgaagatgggttgaaagttttcctgtaggtgatgtgagtccactcgacaagcaaaggtaaatatgtgacagtccggtgcatcttcatctccaatcaatgcaatggagattagaaagatcagaaagtaagtaccagacaaatcgaggattgaagcaatagcgttttcaaaagtcgagtcacctcgaataccaaaaccagccactctttgggttattcaacctgcttcactcgtagtaatgcaatggtttctgctgtaccatctacaagaactggaacatttgcgccgttctgctaatcggttcatgactgctggtccttacaactgcgttgatttgcggccattctgtgtctaagtgccagcacattaattcagatgcaccaataggacatcacttgtaaactggagtcgactctagtgttggcaagacaggaaagcctagagcctcgagacccagaacagccgtagcagtactattcggagaatcatgcgagggcgactcgccgtgctgaaaggcgggcttccaagccaaagtcatacacgaccataatcaaacccatcggattctctcccttcatctctcgaatatagccgttacggcgttaattagagcctggtcgcgtacaagtcgcgggttatcagtaataggatatatatgtgggactacccttgctcagcgcaaaaatgcctggcaagtttatcattccccgagcctaccgattactgtgataactatcttatgtttgatcccgttcgccctttgatatgaaaaattgaaaatttcatgaactaaacaagataagtgaggccatcattataaagaagttgccgcagactctggcttatttgacagcttgtgtcttatttttttctttcgcgctgtcagtcatttgaatcctaaattccatcgatgaacagcctcctattaccgataagcgctattatgtgtaacaagatcctaaggaagttgagttagggggccattatgttgagcaatgtggtcatgtgcctatttgtatagaaatcctcaattacctcgagactcatttttatgagggctgaacagcatataacagtcgcaaaggttatatatacagatagctgtttctatgtaagccccatggcttataagcctcttcttttgacaatcggtcaaagctctcatctcttctcattgacgagagtccaaaccttaataccgtgcgtataaataaattgaatttcacttcctctctttattcttgcaagtattggatcgggcaaaacatactcccgtcattatatcatctaaccagttcacaggcaatatgatatatgaccttaacactatcaatgctcaatctcagctccctatttcgatatcggcccccactacctgcgagagtcatacggcggccaccaagaaattaactgggtcccactgccgcagcaaactgaaggttgtcacggggcctcccaagagcctttatctaccccacttgtgtggtttggaaaacattgcatccgttttgattgtaagataggagtcgccgtgggatacctatcggaaagtcattatatataaaattactggcaaagtcactattgccacacgccgcacccgcccgtctcgcatggtagcaatccggatatatgcgaaagagaatactcgaagactgatatacagattcggacgtctggaacacaggaacgttctttcattacacaaatgctatatacacaaagatctcgcgttctttttagtggatgatttgccgctgacgctcgcgtatattgtcgcttttctatccgtttatcctaacgagacggaattgggatccatcgtaagccaggtttatccctttcgatgagctattctgactctttagatcctcgacggtgtcttttatttatttacgtttggccttgcgtaccaatcattaagctgtgatcatatattgtttggcattgacgggattatcaagataggtttgttggtggccgcatccttgcattatcggactaacacttcgcagcaagtttggacctttgtatagattgcacaccaaagcaatctgaagccgcatatattgcggcccttccttcgatcacaatgcagctcatgcagaaatttgacaaagatcaaggcgttgttggcgtgattgatctggagcgatggccaatcgattctgccgctgtgggttttctgtccgctaccgagacagcaggatcaatcaagtctctgagaaatgtgagttctcccagaaaggtatcatataatgctaatttccagcagcaacctctgttgacggggaagcaccgcccaagcgaggatctggtcgttctcgcaagagcagctctgctttccagtagtttgaattgcgtgtataatcccgattctaaaaagtgaaacgacaaggatatggttcacgactcttataaactggcgaattttcatcatgctcgtatctgtacggtttcaccaatgtgcaacgttctatgcgtctcctatagttctcttgctacataatagggtattttatttctttctggcaacccacaaacacaaggcaagtccgcagcgaagactaggaaatgggaatcgctttccaaggcgagaagctgtgatactagaatgggaatttgactttccactagcataggagcgtgtgccaagatagattgatcattacgcacggcgtacttttcgcgtcaagcgttctgttcctggtagctcacatggttttgtcgtaatccagtatatattataactgcagtctattctacttactggtataaaatcgaaagagaatctagacttaatatgaacaaaatgcaaaatcattttacaaatccaataggaagcaaagaatataaaagattttattggcgatcttctgtcttcggaataacgcccgaacataactaaaagtagtacttcaaagatgtctatttttcggatctgaataggctccaggtaggctccaggtaggctcagggtgggctcagggtgggctcagggttggctccaggttggctcagggttggctcagggttggctcagggttggctcagggttggctcagggtaggctcagggtgggctcagggttggttcagcggtggcagaaccgggtgtcaactccgatggggggaaattttgtgagttccccgcacggtattgtcacacttggttattcgttacccattaaacatcgctttatgttttgtatggtaagtcttaccataccggaagaaccgcgctgtaacatacagtaatagtgccatgccgactatcaaatctttcaataccggtagggtgttgatgggcctgagctttgtccgtaaggcgcggagtgtatatcgccggttcaaagacgcctgaagactggttcccgtcttactcgtcggtcgcaacctagcctgtgctgtgatgccatgctacagtctcaagattcggactcgcaatacatgactgcttagaggcttcggaaataacaggcaaacctatactactaatataggagagatagatgcactggtggcccgccccgtcagtccataaacaacaaggcctacgtctagctcggggcctcacgcaaaccgacacagcttggcgtgagacgagtattatgcttcatacgactacaatcataaaaataaaataaaataaaccatgacatgagaaacgaggttcattcgtgtggtgatactccgtaccttacaccaagagaataccctttactcggaattgaccaaatttttggaagcgaaaattcatcattcgtcttacaccgcaaagacccgctctacaaaagctaaacaggtctatagaccccaactaagatatatgatattgcacccctaaacctgaaccccggttataccttcacagagtgagataacggagaccatttcgtatctatgtcagcccaagggctgttttagaagagcgtgagacagttccatgcaccctttctgcatggttcaatagcatagactttgactccaacttctccccgcaaatagagcactcacagcgcatgtcatttgaaaacggcttgatatgcttactgacgaagtgtcggctcagagatccagagttcttgtacatcctcagacgttcgctctgtggcagcctaggggtactaaggcaaataaagtaaatcgttggtctctcttctggagatttgacgtaaactgaagcgatagctttggaaaaagcatcgtcgctcttagctgaaggggttgaattctgccttttaggcaggggggcagtcggtagcatatcgctagcatcggcggagcgttttcgggcgatacaagaccgcgagggtgtaacctcttctgtatcacagaccgcaattactgcattgattacagcaattcgacgctcatattctttctcaatcgtcgtacctggcatggtcaggacagtgtcgataagtgttatatgctgcggtgtcatatagcctgttcgctccagctcaactaatacttctttgttaataacctttccggaaagttgtcgttcgctgtcgaccactggctgttcgttcttgtaacgctccaggttctcatgaattaagtggttcctttgccgccctttctcattgtgtagttacttaactgagcgattatactgcttatctatatggtcgaatttttgctgtagccttttaactctcttctcttgagctttccgtcgcttgcggatcattcgggaatgagggaaattttcccccgaaagtttatcaccaaactcccgctgtaatgcagcccgggtattttcataggtgcgcttcttagcatctcgaatttatttccgcgcctgcttcctctcttctagagtgcagatacggggaattttattaatacagcttaaatcctctagttgatagggtctacggggatcaatagaccaactcatcgaggaggtaaaccgtatgagctgcttctaagcgggtaggccccgtacaattgcctgggcatctatataaatacctacgctgtagtgacgaataaaagtatcgatactagcatgctgcagtatcacgttctgtagttcattagacatatccgctattaaagagaagcattagcctaggatcctatcatgcataatgtctcactcacggctatcgttgaacgcttttgctgcgctatatcggaggcagtagggcttcgcgacttccgcgaaacctataatttcaccacctcgtttcattcggtaactcagccatcctttggtaagtttttcttctggtgcaattcgaatcccaccaggctcccgtagtgcttggcaaaacacgttttgatcgagaatttcgtcttttagctttaattcctgctcactaagaccatggaggacccggagacagtacagtttctcagggcaatccatcacagggccgtctttggacagacttttgaatgcaccaatcctgaagagcatacccagcagaaaaacatgaggactgagaaccagggtgggatcaaagatgatttccggaattgggaacgtgttcctattccaaaatggtgagcaagctttgactgggtccgttggcggaagaacttcagcatgcagaattgcgcagggaaatcaggggtgaattgaatggggagggaaggaagcaaaagacaggggacattcttacgactctttcccgccaagaaatgtttttgtgaattccggcctcaaataaatgaacagtcggggtcgtccatcatttggatctcgaactaatgtcaacttgaggtcctggaagcgaagtttcaatagtgcccctggacggttaccggtgatagcagctagctggcagaaaagaaggagttgtatccggtaccagccataaggaaaggtcatttctgttgtagatagaaccactcgtgtaaactcggccacatcttcgacatacatagtcactttcggtcgaccttttagagaaaggcttttttctgttacaactatcgcaagtacctattgaaagtcagcctagtcaatttttatcgatatagatattcaatcaggatcttacgtcacggatcttaatatggacatctttgctgacgccatgtccaacctcggccttgtagatcagatgccactacttccaaaatgcgtcgagcgtgcttttggtattcactcccgcggtgtgacgtccatcctttccccgtcgctggtcataccgctaggagaagagagccttgaggaagcggaccgtctcctcggtattagagagccagaacaaacattctaccggatcgcgcttcgtgcctttgcagaacctagaacaatcagcgaaccaagcaaggtagaagtttgtagtgaattctcactggtcctagaaatattgcgtatcatccaaatgcctttgggtatttgggctgtagcgtttctgtcgaagctgggagacatcaagagactcggcttcgtggaggtagtattctggtggaagttgctcctcttcctcttccgataccagctcatcttcggactcatcttcggactcgctgcttgagtcgaagacgctgggctcggtggaggaatcagtgtcggaagcgtggtccgaaaaaacctcagaatggcctggggtagtatcgctctcgttggacggaacagaaccatcaaatgacatggcaggagggggtggatgcgatcaaagaaggtacaaggaacgaggcaagtcaaagaacaagtaaatggtagagactggttctctcttcacacttgagtgccgtgccgtcgaagagaccgacctgagagtggaagagttgcttggtagcaagaaagaacattgtgtcggggccatggcagtcgatatttataaaaactgagggaagaagggaaccaaggaggggagccatccttggttcctctccttcaggaggatggctgagggtgggtcgcggcggcggttgctatagcgcgagtggtctcggtcgggcccaggcaccaggcacagccaacggaaagcatgggtggcagttgagagagtcggtcgtgggcttagattcacgtgatgccaagcccgacaacggtgagtggaaggcttaaaacggcccccgaggcggccgtttctggcctcccattcaccgtctcattcttatgtgtaggaatatatatcctacttaaactgtggttcctacgatatactcttataagggtattaaaagctacaattagattataaactatatctataactaccttaataaacttagaagggaaaaggaactgtacttccttattatccttatctaatatacttatagctactctaagggtccctctagttattaactaaaattactctatctaggaaagaactactagtaactagaaataattctccttaatactagtaggaacctagttctaaggttagtataagttctattagaatatagctaaagtagctaaaaagatataccgaattatatatatagtatactttcgaataatatatataagatttactatatagtatatcgatatagtactagattactaaagggaaacgataattatccttatccttaccctaatcttagttagatacttatatatataagagatattaggcctactaataaagaatagggtttataatagttttctaatatattccctttaaactaatagtctttactattatattaaggatttaatactattatataagtaaaataattagaagaaaggatttagagattatagaaaagtagaagggaaagggtagtaattatactataactataattacctactataaatctattaaaggaatatnnnnnnnnnnnnnnnnnnnnnnnnnnnnnnnnnnnnnnnnnnnnnnnnnnnnnnnnnnnnnnnnnnnnnnnnnnnnnnnnnnnnnnnnnnnnnnnnnnnnnnnnnnnnnnnnnnnnnnnnnnnnnnnnnnnnnnnnnnnnnnnnnnnnnnnnnnnnnnnnnnnnnnnnnnnnnnnnnnnnnnnnnnnnnnnnnnnnnnnnnnnnnnnnnnnnnnnnnnnnnnnnnnnnnnnnnnnnnnnnnnnnnnnnnnnnnnnnnnnnnnnnnnnnnnnnnnnnnnnnnnnnnnnnnnnnnnnnnnnnnnnnnnnnnnnnnnnnnnnnnnnnnnnnnnnnnnnnnnnnnnnnnnnnnnnnnnnnnnnnnnnnnnnnnnnnnnnnnnnnnnnnnnnnnnnnnnnnnnnnnnnnnnnnnnnnnnnnnnnnnnnnnnnnnnnnnnnnnnnnnnnnnnnnnnnnnnnnnnnnnnnnnnnnnnnnnnnnnnnnnnnnnnnnnnnnnnnnnnnnnnnnnnnnnnnnnnnnnnnnnnnnnnnnnnnnnnnnnnnnnnnnnnnnnnnnnnnnnnnnnnnnnnnnnnnnnnnnnnnnnnnnnnnnnnnnnnnnnnnnnnnnnnnnnnnnnnnnnnnnnnnnnnnnnnnnnnnnnnnnnnnnnnnnnnnnnnnnnnnnnnnnnnnnnnnnnnnnnnnnnnnnnnnnnnnnnnnnnnnnnnnnnnnnnnnnnnnnnnnnnnnnnnnnnnnnnnnnnnnnnnnnnnnnnnnnnnnnnnnnnnnnnnnnnnnnnnnnaatatatataaacctatataggcttaggaaggaatatctatattattatatatctattttgatatcgatccgtaaggggtttattatataaatataggtagatagatttccttatagtttaggaccccttaggggcccctccgagactagtaagaattagtcttggcatactatcaatacattgtattccctctataaagccctttatatcttacctagttgacaggctatatacctatataacgtatacctttacatttaccctactagaaataagaatagtttagggaattacttagaatatctaagattggtcatctgatcagttataaaagtagacgttaaagagaattttattaattaagatagctcttaaagctctaaattgtaatcgctttaaaagctagggggtgtatcagaatctaggataaatactgtcatttttcatccctgatacagttaggtcacgtaactgaccaagctggtttttctgcagaaaaactaacttagaaggttttccacctaaaaaactagtcccgcagttttttacctaaaaaacatcctttcttttattttatttattttaattactaagttgtctatcagattattatattttaggactattattagtttaagggagttagagattttattaagatttttctgccataaaatacactcgccttaccaccgtttttctgttatatagtaaattagatatataaatttaaggtccctactataagtactcaaaattttaaagggttaaaatatagttaagaggtagttatagtatatataagaaaattacccttttaggataactgaccttaaaatataagcaaattttaatcgctcactataggtataatctttatctaaattaaaagtagtaaactagatatataaatttaaggtccctactataagtactgaaaattttaaagggttaaaatacagttaagaggtagttatagtacgtataaaatatagccgaattaggttagtatcattcttcctatagccctaaaccttaaagatataccttaactttaaccacaaatttcagacgctatactagccggatacgaaagataagatatgatctagaatacttaagaaaagggctttctagtgatactaaaataataataaatagtcattattttataggtacttagactctatgatttcctatatagagttccagtgcagataaatgtgaatcaggatgttgctccaaagaaggatactgcggctttgggcctgacttccgcggagatgatgtgtgtatttcaggctgcgatgctatagcagagtgcggtggtatgttgatctcccttcacttggtatcctctggaaattaaccatttgaattatagaatttgccaaggtcactgggactgagtgtccattgaatgtttgttgctctgaattcgggtaagctatgatggtgaacttgaatcctgtttctcctttgctgattttataatttcacagcttttgcgggacaactgaggaaatctgcggaactggttgccaaagtggttgcgaccctgttaatacaccgtaagcatagaagacttcgctgaataggatctatcattctaataggagccatcgctcagatcatgtggtagaaagtcgagtgaggcccggtatattggatactacgagggctggaatacgcagagacaatgcgatactgtcacaccggacaacatcttgaacgcagttggtgcatgctcggaggccacaatggtatcactgtctggggacttcacccagtaaagatgccgagtttacctggagcgaataaattatctgaccccgccagttagccagctgcttcgggtgttaattttgggcatagataatttcaggtacctttcgccactgataggatctctgtacggcggcggtgggagttgcgataccctcacaaatacctcgggagaatcgcgtctcaagtggacgtctgggcataactcccatggcccaatgtaacatgcatggccttttctaaaacctgataccatcgacgttttctagcttgcgaattacggcttattctattcttgtatgcgtaataacactgctacgggaacatcactggtcaccggcacttggagatttactctgagtcacaattctttctctgagacgaaagactgcttacagaggggattggagattggaagatatgctcgtcttatgctactcgtatacttgaagattgactggcgaagagaaagatggagtgaaattaggctacgatgatcctgacagtaacctgatgccaacctccacatttgtgttcaagtatggggaaacctggggactcccagggaaaaacccgtaccaaggctgtcatagcaacagataatcatatccaaggcctttggtaaatatgtcagaatataaatttcttcatcaaaatcaggcgagtgagaagaagaacttacttctgatcaggtctgctttgatcctggtgcggtacacgtcgcggtttgcgaagctctcccggtacaatagacggctgtatgcacccaagaatatgtttgcgcaggaataatcgatgagtagggctgaagcgtagtgacgcagctgtcgcaaacactctcaggccctttctggcaattgaagcagtcgcttgggcgtttctggtcgtccggaccaggttggtcatattgagccatcgccgaggttgctagggcaatgagtagaaacaccagtctcattttggccgattcgcaacgcaacttctttttgtctatattagattgtactgcgaatacgtcagtatgttcagaatgcacgaacctttatcaaaggggatatcaaggtaagagtatagaaagcgatcagtttcaagtttagggaacaaaacaaagctcaaactacaattcgacgactggtttatatatatgcctctttcacattcaaagtatacattcagggtaagtgagttatgatgtaatatattcaggaaaaggtctaaggttggagactgagtctccgcgaaacttgtgttacatcagtctgccaaatttgtccagagcaaccagaatagacagcaaaggttctagaagtgtcattatgagagggctgtttgttagctgggtagtaattactaccaaagaaaatcgcgcaccatacttagtagcaaccaaaatgattaggtttggaatacagtgctctcttcattggttcatggtggagaagcatgtagtgacaagtagagctgtggagtatataaattgacaaggacacctgatagtcttgtaaatttggcaaacttgcaacctagtagtatggcagtattgcggatgatgcctacacaagtggagcattgcatatacctagggggtccagagcctgttttcaataagcttctcggtaggtcgtaaatacaattccaaatcgcactcaattaatggatccaagctcaggatcgatgcgaaatgacctttttttcgagcatttccattggcggccgagggatgcgacttgtaatgttacaaaacatgacagagcgccgcgggttccctatcagtcgttttctctacgctcaaccaattgtcaattatcctgttcaaggcttagcgcattccattggaatgaccggatatattctatgattcatgtctctaccacagatactcaaagcaggcggttgaattatcatcttacatccctttttcaaaatctctttttggttcctttcaattagtcatgatgcttctctcaattaaataacatgtacgtcagctctggagcatccagtaagctgcaagcaaccccttaatgactcttgactttgcgactcttcgttaaggaagtgtcatcgccggatctttaaggcggggaggtttattaaggttacatgactgctatccagtaggaagatattctcgaggctactctaggggcggtccttgaccggcaccacagttgcagtgtcttctgcgtggacctaccggttgcatttttggtatgaaacaattcgttgagttttcttacatgcaccccaactgctctggcaatacaacagcgcgtgttcggtaagtccgccaaaaccccaactctgcgagcgtctaacgcacttgcactacagaaaccttttgatgggttgattgatttagttcccctgcatctcattttcgtttcttcgtgcaacagcgaccagagcaataagcctgtcaacgcagatatcgatcctcaaaatctcctgctcaatggatcaggataaatgacacacacacgtacaaagacaatagtgcaaatgatggaattggggtagattttgtccatgattcaaattgctgtggttgggtacaagcgggaattgccgtcggaccggaccacccacgggcgctcctgagctcccgagctccatcacacccgtgcgctagaaaaccttgaaacaacaccccccgccttagcgatggccacactaccgcgcctcgctcgaacgccctttttcggcgtaggttaccagacgcttgagtgctcaaaagtatactctccacaatcacgttactgacaatgaaggcttcggatcattgaaactccggtaatcctggacagccgatttcgcaccaccttctactgcgccgttttgctcgaatccttcaaaacaataaatttgtttagttcaacctgaagccccgagcctggagcgccgaggttagtatactgtatactactatggtagcgatatccggaaaggaaagctaaacattctgcacagagcgaaatgagtttccggtttagcacgaccgcgtctgcacaacagctggccgacaacattccctaaggcttagcaatcctcaatcagaactacgagctagaacaatgatcgcgtgttccgacgcgaagtctctacattgcttgctgcaatcgatccacctagatgacgcccaccgagttaatactaggttcaacgacgctttgtcggccaaagcagcgctgcgcattgaatactggacttggaatcaggacatgtggtgtgtgttgacttcaagtcctcttcttgtatatagtcatgatcttggccttgatgcctgtggcgggtttatcgttataatctcggatatcacatcagagaagagggcagagtatgcctataagcagcttgctaaagacatacaagaacacagataaatcaagagcgatttgtcgataatgattagtcatgagatttagaaccctctctccgcgatattgtactgcaccgaggatatcattcaagaaatacgcgaaaatgaagactacgaggcgctgtgtcaggaccccaatactaagaaggctgatgcctgaagtatggcacctgtcatggtgtgtagagcaccccgtcctgggtgcgtgggggcctgtggactagacaggagcaatgcgtgctgcctgcacagcctcattggatcatgtgacccacaacctgtatattatcctcgcatgctgcttctttggggaagtagctattagttccaatataccactgcgtatactactatctctatttcccgatcctccattacatataacattcccttaggcatttatacctaggggtctcaccaaattgtagacatccctgctctttccaagacactagcctaagcaaatattattcccgatatgatcagaactgatggaaggattatcatttgaccttataacgtgccaggtggtgaaaataaaagttgaacacttgaactctattttttaatgggccctagccgactgatgcggaggaatgtggagctctcccgtgatcccttggagccttgaaaccctctagattcctcccatactatgatctcccttgatttgtgaataagaggggggaaataagccatctgaatactttgagcgtagcatagatttggcgcttgttaataggccttgtagtgctcaacgtagaacggcatgaggattccgcatggattattgttcgtttcgtttcgtttctaacataaatttacatttgaatattgaccaactttggtgtaaaatggacgagcctttcttgcagcaaggagcatatttttgtaatgctttttgtactcacgatacaggaacggaacatatggggatcatgtaacattcattgtttctatacggtaagcctactcaaaacttggttccaggagataaatgtggcatatatcttagctatagtattactcttataactattttagttatgccgtcatcggatagacagtgccatttgaaagaagctgtgagaggaagatttcataactaccaccagagtcctctccctacctttgtcggcctttttgaacagcaattactagtgacaataattcggcttcttgcttctgatcttcgttgaggattagcagaaaatgtgaaataggtaacattaattttaaaaatgaagaaagctaaggaatgcaggaaggaatctcctattttggataatgacgcccactgtccactgggtgacgagtcatggaataagatgtgcaagttagcctcctcccaatgcagccaagtggccaatgtaacatatgcactacgagtttggaacccgcttaagcactgcatatggaagggcattgcctccaatatagccaatcacgctatatgtttaggatcacgtttatttgttctctgggaaagtgtcatgcattgtatgcagcggtcgttttaatagagcagcaacgaatgtttagtggaagtttgtccaccttggtcgactgtggttggaaactagtcatgaactagtggtaagacgttcccagcgcgtggtaggcgctggcattatttacccgtgcgctatgttgtatgaccctggcttgctatagctcctaaacatgtgacttccttggctggagtgcaagggtcgtggtcatcaacccaactagtcgtaaggagcggagtagaccattcgtaaagaaattctttcaaccggttcccaaccaggtgatctcttgtcactacatcattcactgtggagcagatgttagtttggtatgctacccatgttgttcgaagtcatcggagcagctattaccgttattggggctattatgtgtgtttaactaagcgagagagggggttggttttccgtatttaaaatacccacacatttagctattgaggtagttttactgtcttaggcaggacaggacctctctccccccttctctctcacggtcaatctacccagttcaagatcaatcatagagacagtaagagatataacgcccaagtcgagatcaatatgcctgctgacctggcaggggtaagacagaagggccgcatcggtggacgagcgatgaagtcggtcaatatagaaaggtagtttagggtgaatcgtccgtggattgacatgcgcaaaaaatctcccacttaaaattaactggaatctgaatcttatcatatggtggttggccaacagctctttttccgttgataaatctagaaggtccagggatctgatactctagcgataaatacacaatcattccctgtacgtctgcgcctcatttacctacttacgttgtatccgaacaccacggcaaaaaaacaccaatgtcgaatttactctgtagagaactccgtagggctggataagtctggcctggcgcgaatagactgtcgccgaacccagaatctgtgaaaaagaccttcggggtattagttgtcggtcatacgaataaataagagacagcacaactgcatgataaagggcgaagaaggactaaaaaggaaatactcacagcattctaaagaataaatattaaaaagcaacttgaagtgccaccctgaaatcgatgctgactgggacattcccatcttgaccgaggtctgtaaggcttcaatagcacaccaagcagctcttgtacatgtgcttgagcctgatatttcaactttgacgtcgttcaagctggaagagatggtttgcacgtttcgggtcgcaagagttgatctgaggggcctgaagtttccacacagtaaaacatgagcctgacgatatagggaaagcgcattcgctgtaatcaccccgccggggtatcttggagagcaatggaagtctgggatctgctcggcgcacatacgccacctagccagagcttgttcaagtcgttgcgttagtgcctgggtctgatctaaaagccaactatcctggtagagatttgccagtggttcaacgatgccatgcaaagtcaaataagacgcaaaaatgctcagtcgaagcgagggcccactgagaggagaaaattttggccattgcgactgagaagcgaatcagcggtttgaaactggactttctagtctcggaccacgcctgtggggatatgctcatccgttcagattcttcgcatggcagaaaacaatcacttatatcaacattccaagagcagttaactgtttggaaggcgacgcctagcgcacccagatagacgtatatcgagcaaattgctctgtcaggtgacgttagatttgtacagattgtccaagataagatgattccacataccgcacagttgtctcaaagtcaatctacttctgccatcgtcgcaaaagatcaacgtctcctccgtctgactctggtgcgtaggggggcagctttctgcgttcaaaatgccctgacaagtcggaacattgattagtagctttactggagtagatcctccgaggagtgacagtgacaaaatactgcataagggcaccctctaaacaaaggatttttctacttgtcacaattatctcgatcagaagagaggctaatgacgctgcttcttggaaggtccggaaatctccactcttcgtaccgtttgccataactagaagaagacactgcagtacccatagctttttatctgcgatagtgagctggctcagttgaacctcttttgagtcagggaacatgcttcatcaatgggtttgccttgcgtacatatttgattgtattggctttagacatgcgatgaagcgaagcagcggttagctcatcgtcgtagtagatggcgccgatggatgccatggcaaaaatcatacatgggggagctaggtctgccttctaggttgacgtatggatacatggtatgtatatgaggagatgtgcttagtactctttctaatgtgaagcgactcggaaatgtgaaactgatgatatcttcggtctgcaggaatatttaagcactgtgggctgggagatccagtacgggcatcggtctgcggcttaccgacgtaggtgtatggaacgcggaacctaatttacgccacctgtgctccgagatggcaaaagagcctttccatgctggtgaatctattaccctcggtcgtgatttcgtggcagcatgatgctttgggggagaagcaaagctattcaatgccaagtcggattgcaagttttcttgcgctctctcggtcgggttttatacatatcagactcgaaagatcgcggaaagttgagagctgagatccaagagcctatggtcgggctattgatttccaacatgttagttgggtcgaaggcgggaagccaccctgtagctgttgagggctcaaccgcattttgcattttatgccgtcaccgataagatcgtgggactggatgtctgcatgaatattgattgtatggactctgacggatcattattgacttcctgactatgttgttgggttcccatgtggttccgtgaatggtgccttttcaagacatcttgccgaatgaagcttgcattgcaaggggtacatctgaacgggtgctcattgcgatctggaaaacatctggttaatatctcgggcaccgaacggtttgacggacctaggagagcgctcgtgtctgcaaatgtgttcccgccgagcgaatgcacgatcacagtaggagcattgttttccacggcgcgtaacgtcaggtcccgtagtatcactcattctcgtttattgacatgaaattagaatcgcccctagcatctctcattcccagattttcgtgttcctagtcttcaaaatcatgacacttgaaaggttaaaatacctcactattaggtgacaggaatgacttctgtactgacaggggccgaaattgccaaaagtacgtctcgtcctcatagaaagaaggatggccccgcttggttttctcccttcgcggatgtgtaagccgcgtaagccaataagatcggacagattaaattaatgcctaagatataaggcactgaggtcacatgctatctttattcctaccgcttctagcttcctgcattcccgttggtcactttatgcctgatattatcattggtctatttcctcaccgctcacgggtaattctgccagtcccatcaaaattcttggaccaacatagagtggtggaagcttgtacttgaacaaaagttttaagaatgtgcacgtatacaatctacactgaaaataggagtgatcaactaaggtaggcactgtgtaagatagatgatgatctagctactaaatggcttcatgtggacgaagacacaaatatcgtctcgtttgtaaatcaggagcagtatgttctacaaaacaagcaaggagagatatgccaacagtgtgcctgtaagacggataagggaaaaataagttgtaaataagagaggcagcgggtgaagaaaccaaagaagtctgtctgccaaactgcgtgggaaatagcgaacgcccaaatgcatcatgggtcattcataatgaacatagattctataatacatcatcaggctgataccagatattcaagccggcattatcaagatcccgctaatctagcaggtggtgatgtaaagaccgagactagaaaggttgttaactaatatccaagcagaaatataggggaagggaacatacggagaggggttgtagtcttcgaagaagttaaggtaggtgcttccagagttcttcatctcgaaggcgacagtctggccgccaggacaagcgaaggtagagatgacgtatgagttaccgggggaaacggttatgtcgccgaggtcctgggacacagaaggcaggttgttaaaggtagtagactcgtcgacagcggaagagagcttagcgaagtcgatctttccatcaccgctaaagctataggacgaagtctcgaggtcctggagctcggggaaaaggaataccaggctgcaagttttaccggagtcggacgagggaatgtcgaagttgaacgcgctcgaaatggtggagctcacggtaccattgtaggaagtaccaggcgcagtgtcaggcgaggaggagtcaacagggacaatcaggtgggggtattcgtagctgccagtagtaagagtagtggggcaagagctgctagaggatccagtcgctgtagtagaagatgcggaactggtggggacagatccactgttagaatcgctgggctgtgagcctccaccagcactagatggagaaggaacagagcccgtgggaacagatgcggtagagccggagccagagcccgtggccgtgggagcaggggcggtagagccggagccagagcccgtggccgtgggagcaggggcggtagagccagagccagagccagagccagagccagagccagagccagagccagagccagaacctggactggacgagacagaagagaaggttgaaggagcgctggaagatccgacagaagagggagcagcgctagcagatgacgacgagctgccagaaccagagcccgagtttgaacatgagtcggcagtcaactccacgttcacgcaaccggtgacatcggacttgttgggggcagtgtagacgttcagaccaccgttttggcccgtggcacaggcaacaaagtccttgctaccgttgtactcgagctcaccctgggagctaagagagaagccaggagtgggggaagcaccctcatcacactggaactgagtagtaggggctattcaatagtcagacatgctttagttgacataagttgggatggtcacttacgggtgagaatgcagccacggccgtttgagtcagtgatagcacctgtagaatcgatgcagtattgagcgggcgacaggctgctgtctccaatgcggttctgaccatcgcttagctggccaagttcgccggaggcaccaccggaagaggtgaggtgaaagcagcagctgtcgctacggctaacgagggcgttggtgctggcagcgaaggcagcgatggtgatgaagttcttcatcatgattgctcttcggcgaatgtggaagggttggtaataacgaatgaacagaatgaatgttcttttgaggaaattaattcaaagatcttcgagtgtgatatcgaccacgatagttacagcagaaattaatctagaggactcggttcgtggaaggcgcatctttatagaatgcagtggattagagatccagaattatgaatcaaggaattacatgttctagtaggcggcgaaactctccgatgcaaaaacaaacaaaaaatagaaacggcatgctgtcaggcaacctggcaccatgtgagtgaattgcaggtccgaaccagccggagcgagatgtggtagaccgtagtgacatagtaggcgctgtctaaaccagatatccatttcattaaattgtggagtagaaggccatgcttgatagtccacttacaaccaaacttggacatggatgtggacccttctcaaggtccatttgaacctgctatccacggtgcagttgaaggtggcaaaccaccttttccatggatcgttcgtggttgcattctccgaaaggctcagagtggtctaccttcggatagaacggatgaagttatatatcttcggttagagaccgcgggactttgcgagattgatcgaatgcaactgttaacaggtgggcagcattacatggcatggtaccccgatactgtcttctagctttggacaaaaatagctaagcataaacttgggtatgcttggtatactgccgacttccagccaacagaaaggaaatagatcgctacatacagggctaaaaggactagaccacgtcagtgataatagccgattcccgaaaagtccctgtctctggataaaattagaataagatattgagagctgctacagtggaccggtggaactgggacttatgcatcgtatgtaattggacatggacaagtgtatgacctcaagacaaatttcaacaacaaagaagaaaagacactggatgcgaagcggtttttaccaagtggagcccgctttattcaacaatagtcgcggctctctttgttccttgttcaccttgttcgccaccaccaatcatagttagttgctaccttgtgggagttacaaagtacattgtttggtttctgttgttcgtttattttttgtgcgtaatagttcacgccccacgatgcgtgtctttttttagatctattccttagactgacgatcaaacatcgctctagatcgatcgcaaacaccctaccatattgttttagacaaaatgatatcaattggaattcggacatattatttgatatgcatattgggtggttagcaagccttccccaatgctctcataaaaccccttattgtattgctttgttcaaatatggattccctggctgttggtcgttctaacttaaccccgccatgtcgatcgcactatggcgatcgtactatggacgcgacgatgagccaattggggagtggggctccatataatgacatacatctttacataaaattgacacgtcgtgcgtcatacgatggtgatgtcaatttcagattccataccccgtactccgtacatctaggtatatccacatccacccctttcgactccacaaagacaatccgatagcactatgctgtcaaagacaactactttttttccaaccgcagctgctatcaaggcaggagaagcttcaacacagtataacgatgctattgactggacggaggatgttgccaaaggttgctcatataacccagccatatcacaacttctgctttctatggctgctattcatacctcagtggacatgctcacacaggtccttcttgacatccctgcgcagtccgacctggtcagagctctgcgggaggagataataattgtgactcgggacagttaaatcaaggaaattcaacgactgaaggctgtcacaattaggaagacccatcatatatttccgcttttttcaaatattgactgatcctagccccgatgccccgtcttaccaccaccgacgtttgagttatcagatggagtcttcgtccccaaagactcttaagtcttgatctccgtggatagcatgtgggacgaatgtaattatgaaacctggagaagttcgatgttgatcgttttctctagatgcgtgatgttcccggccaacagactgttgcccaaattgttgcaccttctccgattcacttgggctggggctttgggcagcatgcctgtcctggaagatcatttgccgccaacgagacatgcagctatatgaccggacgattatgggcagtgggtgaatagtacaggctctggaaacaatccatggcgtttatttcggcctttacattacccagaagcctgtcgctcaaactgtttggggtgcgatcctatataagatcgattccaagggcttcttcaagatgagcactagtgctgacgcacacattatccagactacataagacgaagaaccgattgacctgggtaatggtgccaatatgcatgtttcatgaaagaggctacgggatacgggaatgggcgccacagatgcagaaagataggggtgcaatgaacatgtaccgttatgcctagcttctcaagggtcagctattctaaattcacctgtgaaaacaatgtcaaggaaagtagagaatgttcggagtcatgaatctatatttaattacattttattccgtgtttgaagcctattgatatctaggtggttttctactatcagatatgcaactattatgatcccatgccaatcagacagccgagaaaattatgaatgaatttactgctctttctgtcactttttcattgttgatgggtacatacatccaagcaaggcagagctgttcaagaatgtacgagttgactacttctacgaaggggcatagcgcgcaggcggcctccgtcgatatcaaaacattcctaccgaggaatgccgaatatggtctaattggaggaacaacaataataaccggtgaatttgccgagcatttgcaagttcttggcctattggcctaactattgtagcagcatatatatgatagctaatcaagatatccctcgttggtgttcttttttaccaatgtccgatcattgtcgacagtatgcaaatatataataccttgctcagcggccttgctatccttccgggagctctagcttcctggcctttcttggatcgcaccaaagagatatcgacaaccatctatcacaatgaccagcccaatgtgaaagtcgagaccatctttcaatttcccaacaatggctcatggattgataatatggttgttcgatcagacggcaatcttctgttgacgcgtctggacacccccgaagtttggaatttcgacaccacaaccggaaatgcgaccctcgcctactcgttccccaatgtcaccagctgcttcggaatcagtgaaattgaggacgatgtcttcgcagttgttgtgggcaatttctctcccaagaccttccagccaggcccaggctcgttctcggttcataaattggattttaccaagatcgatgctgaggataacgagcgcgcaccgaaattgccaatggcctcggaaatcatcgcgatgccagaggctgaggccctaaatggcatggccactttctcacaggggtcaaatttggttctcattgccgacagccccaagggagtaatatggaaggtcgataccaagacaggagactattctgtcgcactggatgataccacaatggcaccggcggagggtcaggctcttcctctgggtgtcaatgctctgacaatacttggtgactatgtgtactataccggtacaacacgaatggtatattgcagagtcaaggtagacaaagatgtcaaacccatcggagattttgaggtcattgctagtggattccttcccgataacgttgagatgaccgaggatggcattgcgtatattccgacagctccgcagaactctgttgtgcgtctcacgccttcggggcagatatccctcgtcacgggtgggcaagtatctacgcaactagcaggtccaagctcagctcgattgagcaaagaccgacaagtactctatgttggcaccaatggtggccaaattgcgccggttttgggctcattcatcgagcccgcaaagattgtcaagatctcattcgaaaaatagggaaagcctgatgcttctagggacgcttggaataaccattgtggacattcgaagttgacgaacgaaaattgatgggaatattgggtttctcggccagcttgttgtataattcgatttatgaagcattctattcttgaacacacgtgtctctctccgtcatcgttcacattccagattgtgtgagcaaaggaatgagagcctgcgaaggtatcagctttgtctctgccttatggtcgaaagtgagatagtatcctcactcaattgtatcaacccaatgttgtggatcttcgcacgacttaactcacgatctcgagcaagcgatgtaaagccggcctgtatataacagtataatctccaccgtatatcctgtaatgacagcgactctgtgatcagctatgccccgaagttgggctactttgacccagctgagctcgtgagtgactttggtctagttcattgggaattgatcaggagtatagacgaagattgcgaacttgtttcccgagccaaaacctataatcgtgatacatgcctttcataccagggagctgatttcgtccatgactccatgtggagttagccaaatcgaatggccttcataggcatatggtcaactcggagagtatcggtgaaaggtggcaaactgcgctaaaccgatagttatagtggtgtgcaccgcaatgtagctgttcgaagtcatgtgacttctctccaacaactattttagtcccagcagataggtagtttcctgacggaaaaacggtggtaaggcgagtgtatatgtggcagaaaaatctcaataaattctctaactctctaaaactgacaatagtcctaaaacatgacaatctgatggacaacttagtaatcaaaacaaacaaaacaaaagaaagggtgttttcgggcgaaaaaccagcctggtcagtcacgtgacccagctgtatcagggatgaaaaatgacagtattcatcctcgattctgacatttccttttctctctttacgcaattcatgagaactttccagagcgtctacatttcatccgtagactcctagattcatctccaatagtagcaatggacgaagaagctcacgatagtaagaaccgtgttgacctgactctggtgatgtgcttgtacctcaaacgactgaaattccaccacgctctctcgctgaggttccggacagtggacacctgaggtagccgcgaaattattagctaagcagtgccagccaatgacgtcatattgtgatgtctccccacgtaggagtaacgtagagtaacagcatgttgcagccttacaggaccagtttctcttctatcatacactcgaatttccaatatcaaaatgcctggacacttcggtcaaaaggtcctcaataccttaggtctcaacgaccatggcaatcaacaaaactcctcggccgtccatcttccaggcagactggctgtgaacaacgacgagcacggattgtcttcacctcctaataatggcacataccctcgtctctgcaggctctcagatggcaccatcctctcgtcctttacccgattccccgatggacaacgctcacttcgcgtcgcgaaaagtaccgataacggccgcacgttcgaggacttctccgaggtaaccaggggcgccggcgacgtggataacatgttcttgtgtgaggtggcgccggggacaatactagcggcctttcgcaatcacgacaagggtccaaatggccccacgtacttccgcatcaccgtctgccggtctacggacggaggtcgggtctggaaatttgcttcgcaggcagctgagaaacgccctcccttgggtatttgggaaccattcatgcgcgtcggacgccaaggtgaagtgcagctttatttctcgcaagaatttgcacataacaaccaatgtaccatgctagtcgtctcgcgggatcaaggaagtacctggactcaaccgacctgtctgcatggtgacaaagatcctcttcgcgatggaatgtgcggcattgcacgaacttttgataacggtcgcgaggctcttgtcatggtattcgagaccacccggtacggacctttcagtgttgaagcgcttatatcatacgatgacggtgccacctggggttggcgccatgaagttttccgcccacgaccgggtcataatgcaggctctcctcaaattgcctcttttgctgatgggtccatggctactatattcatgacagatgaagattccaagcacgtggaatgggtaaagaatgcctctatcaaagtcgtatttgctggccagccagttgatgggcgggttcaatggagcttgccaactcttgtctctccggcctccagcttctggcctggaatcatgacattggatcaccacaacgtgctagccacttatgaccgtggtggaccccttgcaaagactatcacctggcaccccgcgtaaacatttgatcccaggggtaccttctatctagcgagagtctgcgactgggttctagggttttcatacacattctttgttgtctaagtgggtggcttgtccttcgcgtgatactttgctgggcaatctccgtattccccgcacattcccagtggacttgatagtcccaggacatgcatggatggatagttgaatattattccatctcttatcaaagagcacacttgtactccacagtccactcaacaataatacgctgtagcatccatatggtgatctctctttcaagtcagctttttcgctgcccacctggcagtcaatatccgagatcggcctcacctcaccctgactcgcgtgtttcacatcggatgccgggccttggaggtggcgttcggttttcggcggatataaactatcccggtggctcgggattaaccgtatggggaaattgatctcggagttaatctgataatctgatcggattacaaaaagggccagtactatttatgtataaaggttcttctgggtaacgttggatgttcccttcaaaacttcatctttcgaaatgtcgaccccattacggaatattattgttgttggcggctcgttcgtcgggcgtgtgggttcattctgctgtacaagatgaaattcaactaatggtcaatacagatgacagctcaggagctagcatccattgtgccttcaacacatcgggtaagctatcactgagatctaccttcgaaaacgaaactaatggtttgtgcaggtcctcttgactgagccacatagccatttccaccaccttttcacctttgtaagttgacttcggtaccagtgaacgttcattccactaagccttcgcagctaacatgccccatagcctcggtttgcgattgttccgggtcaggagcacaaagcattcattccgtacagtggtatcttcaaggcgtcgcccaatccctccaaccatggcgtagtccaggctcgcgttctatcggtcaagcccaatcatattgagttggaccgtgaatggcatggctcaaaggaacttccttttgactatgtcgttcttgcgacaggcacccgtctctccaagcctgcggctatggacgatgatgataaggcatcgtcagtcgagtatctacaaaagcatcaagctagcgttaagagatccaagtcgattttgattgtcggtggcggtgctgtcggtgttcaaatggcgaccgatctgaaagaatattatccagacaaggaagtgaccgtggttcaatctaggccgcaggtgatgccgaacttccactttgggctccatcaccttattaagagacgatttgatgagttagggatccgactcatcactggctctcgagtcattgttccaccgagtggatttcccaacgatggtagtaccttcgatgtccatctcacaaacggtaacaccgagtccacgcaattcgtcgtcctagccaccggacaaactccaaataaccagctggtggcagacttgaagtcttctcgcccggatagcgagtcggtcatcaatccagagaatggatttattcgcgttagacccactatgcagttcctagatgaagaatattcgaacatgtttgctgtgggtgatattgcagataccggtgcccaaaaggccgctcgtccaggctcaatacaggcagcagttgtcgcgaagaacatactggctttaattgaaggacgcgctgccgagaacacttttgttaagggacctggggccattcatttgacactcggcatggtaagtcaatcaaccctttatggagcgagatttgaataggctgactgttgttttttagaaacataatgtcattttccgcaatcccgatactgtggatggtcagacagagccctggatcaagccaaaggatgagtaagttccttcaattccttatgccacgccaggagaagctaatatatttaccagtggccgagaggatctgaatgtggaagctatgtgggagagactgggtatctcggttgagaatcctcgtgaatatcacctataatcgatcacgatgagtgaaagaaagggaaattaatgccacagaggtctataaattgcatagggcaacagcgaacacgtcagaaactatcatatattattcacatccagtaaccctatcgtgcgaagacgacccgagtttcccgtggatcgtgtcaatatgaagaaattggaattgtagaagatcacaacattctgtttaattgtttctctggcaggcagcttgccgttcagttttctgtgttgccagcctctttgtgtgcctgcagagatgtgggatctgtatagagagattataatcattcccttagtatattgctatcacggacaatgcaaatcgtcgggccagcctagttgtttattatcagacagcataggttgattcttcgcaaaccatttgcagtgtgccgttatttgaaaatccggactaaataataataaaatcgcacatttaacacaccgcgatggaaatatctatagtagaacgacttcaattcactagaattgtactatctagacttgggtttgggtagggaaattcacccacctgatagcaatgggttcagctttggtgtttcataaaatatatataaccaggcaagtcaagttgattctcggataagtagactgcaaggggacctgccaggctcgtgactggttgggaatcaatagttgttctgctacgtctgagggcgaatgagaaactattaacgtgaaatccagtttgatttctgcttcgtgccttgaatattcgtgccccaggaacgtgctaagaatttccaatctggacatcgggaaggagctatttccgacgatgcggctttgttcctgatctgcaccagccttgtatccacagtgcggaagaagaagaatggagcttataggtaggtctactgcatccccttgatccgtcttgatccaagtggacgtgcgagcagcggccaaggaagaagggaaggggaccttggcaattcagcccacacgggtaaagattccgtgcctatactccttctcatttgcgggtcgggtggaatagggtaatagtggcgtctaccttgtccgaaattcactgctatctttagtccgatagaaaaggtcggaccatcgtgcacctaggccgtgttttctagtgggtcactccgagttctgcgcattttccaaatctgtgcaagatcctcggaaaaccccatatgatgtcgcttgaaggaacgacatgatctgcgttagagtaagagtataaggcctagagggatcggaagataaatagtcgccgatggtaattgctggtggatatcgatttccgtattgagtgtgttgtatgcattatcactggcatacctagagagcaggtcttcacaacctcaggaaggaagatcaattgtgtttgctagtgcgtcgaggcattgccgggatgcacctgtgaccttgccagacctctttgccctgtttgtgatcctttgtgctttaaggcctttgttcctttatgtctatgaaattattagagacattcacagcagtggttagatcgccattaggaatatatattctgttgatcacttctcatttactcagccatagagtaaatacagtctacatccatcatttactccgttgtactccgtatggctttgctggatcacttagcacctctcatcaagtctttcttccgaaacaaggatcggcaccgtcggggatgtgaggcaggtgggtttcataggcaccgctgtcccttagcggcgggctacggtgggcgatgcggcgggggccttataatcgccgacccactccagcccacgtggtgcaggacgaagtgatatctccttcgcttgtgtttggaaaaagagtgacggcgaaccattaggctattatattctacagggcaaagcggtgttttcaattataaattgagaaagattgtatgattcagtatgaacatgacttagatgactttggttcacatcatcttcaagagaacgagaaattcagactcgagttttccatgctcctccaccactcattgtaatcacagtcacagccactttctactgtgaacaagaggtaacaactcatgccctgtaattgatggtcacgtggcaactatcgcagtttcccgtgccaaaactgccaatccccacgtcacagctgtccataatggtagtcatggtattcacgatgtcttggcctgagataggttggtctccgctgccgttggtcgcgtacttcacgtagcagttgcctttgctgaactcggtaccgtcggtgtatgtcgccgaagtatcgatggcattcttcgcattaatgcagttctgaggaatgagggcaatgcctgctgcaccggagccctcacagctgcgtgaattgtcagtaattggtgggcttgaagttatagaatgtccactcacttgttgttgtatgctacaacgtgaacccccattgcgacgaaggtcgccaagatctttgaagcgtgcatgttgacgaataattttgttgttgggaaagatgtgaaggctgtcgagtgttcaggagtgaaacgaatttgactagtaaaccataggattcaatggatcggcccatgctttatacccgatagttactacggcctcctatgtcacttttcaaaacgatcgccgcaatctttcgagttagaaggtatgccgaatggatcagcatccttgtctactgactatctctaagcaagtgttattgacccattcgataaacacacgtgtttctctcgtcaatctaccgtgctaatgagtggagacagacggagtatatttaccatccgtgatatatggtagtctgtttctatcgttaaaagtctgcgggatagacggttacattcgccactccaggctacgtggatgtctactcaccaagccactgcgtcacctttacccgattaggaaactgcccttgggaagctcaaggtatgacatacgtattgcggatagcaggaatgacccattatggccttgagtgatcatatatccttatagatgtggtataaaaagttgccatttctccgacctttacttaacttcaacccacaagtgtcaatcgcaaaatccatcttaccatcttaccatctatcccacatccgtgaaaatgcagctctgggcttatctccttcctgtggccaccattggtcaagtagccatggcctacagcagcaagtaagtattacgtctacggcacctatctgagactgctggtttctaacaatcttcagctgtgaggggtctttcgtccttgacacggacctggtttccattgacaaggactgcgcaaaagccatctccaatatcgacacatcggcaacatacaacgatggcagtcagttcagtgagggccactgttatctggtctatgctacaaatggcagtggtgatcagcctgttagcggacagacgattcatgacgttgcccagagcattcttgatggctgtgcaaagaagcacgggagctatggaactggaaactgcgatgcctgtcatgtcactgtcaattaccgatcctgagaatgtatatagaacttcagagagatcgacgcgagatttccgttatctgttctcttttttggcaaagatgttaaatcagagctcgaaatgcacggtatacacttgaattttgaagtgaaaatttggttcaactactgcgcgagtcctcgtgcgcgtagcaaactgttgttgacttagatcaccggtctagcgatattgtaagcaatatatctgaatgaagttggccttgggatgggtcaatggctcgcagatgactttaatcaagtaattaggtggaaattttgttataacaagtgtttctaaaaagtaaattgatttctgcaagatttttcagatgggttgggtttgcgttttgttctatacacaatatatctcatttgagcgctgttggcaaagaagaaacactccagaaaggtcaaattacattgaataagctcaatttccccgaactacatctcaaatcacacaatatcatcagcagtgcttgattccgtggagctctggcaagttgactagagttcctcagtctcgggcttttcctcgtctggatgattctaatgagaccgatcacagtattttggaagaacaaaggagcgctatccgagtctcgatggaattgcccattgataaaatccccaacgtcaagattattcccagctgcactgcaaagatgcttctcttatgagtcaatgtaatcggccttcctcggaaatcatactgaagtttgaacacatagcatgagataaggaaagtgcggcattgtatagtgaagggtatcagttcttactgttacgcttcgatgtgaaggggaacccacgtgctgggtggcattcttgatttcataattcaatctgtctcccgaggtccttcggacagccctaagccggattttgagacggtgtagtattaagacagatcggcgagctttgccacgtccgcgtggagggctaatggagtcattgcctcttcacgcttcaatcttcgttctgaataaattgctggagatcagcaaacaattccacttcgacagagaaaccaatgagtatgatcaagtttcgtgggggccatttagtttctacgtcattgctcatagatctctccactctagattagcttctactctagcaagtagtctgtaatgacgatatcttccgtattaggaaactcctacggctgaacttactagaaatattcgcaaattaggactccttaaaatatgcacatgtcgaatttgccactcaggggtctttcctgagatatttaaaatgtgatgtgggtgactggtagagccaagtttcccttcaaaaagacgaacagttgttattgaaatagacgttacctaccggccagcctgcagcttctcctccaactctgttgttcaaacctttcttgttccgcaaaccccattttctcgagctttctacgatgcaacttattgcctacctgatcggagccgtggctcctgcaatgttggctatggcttacaatgataagtaagtttacgtcctcttgtccctattatttctctagcagacttggctctttcgttcggaatgttaatgagtctttagttgcgacggatctttgattccagcgaacaaagacgattgtctcaaggccatttcaaatgttgacacgtcggcaacatacaacgacggtagtcaatttagcgaaggcgaatgctacctggtctacgctacaaacggtagtggtgatcaacccgtcagcggacagaagatccatgatgttgctcaggccattgtcgacaattgtgacatgcaacatggaagctttggaaccgaaaactgcaattcgtgccacgtgactgtgaattaccgctcttgagggatggatatgaattgactactttggtgatatgtaacatgctatactgttgatgggaagtggttgggctgaatatgcgaatgaatgatatatcgagaacttgattactttccagactatgattagtagtttctttagagatgttgttctaaaattcatccgaagtttgtagaagtctaagcatttcgcactcccgatttcttcacggctgatggcccccctcgaggctttccacgggtgcttatatcttgaacctctgttggcacaaacaagacctgtatacatggtggaccgcaattcctaccgcaggattcgcctgcgtggagtggagatgaaataagacattcgatcaaaggcaggataacagccacatggtcaagtgctgcggtagcctaggtatctatgataagggcattgatgtatttctggcattctgtcagtattaacgagagcggggggaaacgagacgtgttccgccttcgagaaacatagtaaaaggaatcaagccactctttgggattgattattctcatcgtctgtagagcgtgatctcatcaaatcccatctcaattcgaaggccctggcgttggtctccggtcctctgggctccacgagggtcgggtcgaagaatccggacatccagagtggccccgattcttgtctggcacctaaaatgggttatcgagatgtcggcaaaacaccgaggtcatataagcgaagaagccgaaccccgccccgtatccgagtacagactcactccaatgaagagcattgactggaagagcaatggtgacaatgtgccattttgatggttactttgcagatctacctgatcaagagttggaaaacatggatggagccagtcaaaataagcctgaagtaacgtatcacagatagcaggcgacaaggatacgagggccttttgcttctcaatatttgcttagaatgccccgaggctaaggttatatcaagttcgcgaccaacaaacgtcggcagcttaggggctgccaccccgagtacgtgataaagactgtcaagtcgctaatcttgaagcttagggttacgacgagtgcagacatattgatatataattggcgctcatgggggatatgggcggtttgggtaaacaacatcgcctgctagcaatagagaactcgtatggcctcatttgccaatcagaagcatcaaattatctgtgtgaattattgggctcttataatatttgttgtatataggatcaatctgatagacccagctccgctagaatggcttcattgtgttctccaacccgtggaaccgaacccatctgagcgccatatccacctttttcggtggaattggttgatccaggaggcaaaagagccgggatggctcccatgggagttttaaccctggtccaccgctctcgtgcttgaagctgagcatggtcccaaacatttttcatgtcgttgacactagcattagcgattgacgcttcgtccaaccgagcgattgtttcctctgctgtaaacctcgagaacacgtcgtggataatagatttgagctcatcccgatttcgagttcgttgtgaattgctcgaaaatctaggatcgatggctaaatttggttgtgagaggacgccgttgcagaaactaacccattccctctcattctgaacgcccaacatgaccgactggccatcaccagcttcgaacggcccataagggtagatagccgcatgcgaggcacctgctggcagcggtcctggagcgttgtcgtatgcgtagtacatagggaatcccatccattctaccatactctctagcatggagatgtcaatatggcaaccctggccatctttaccacgttgcagtagcgccgagagaatgttgctgtaggcgtacattcccgcggaaatatcggcgatagagataccaaccttcaccggctcttttccagtgcccgtgacggatagcattccagcctcactctgaataagaaggtcgtaggctttcttgtcacgatatggaccatcttgcccatatcctgatatatcgcacacgatcaaagcagggtatttctcttttaatgcctcgtgagaaagccccagtcgcgcactagcaccgggagccaaattctgaacgagaacgtcagccttttcgaggagcttcatcaggactgcatggtccttggagcatttgaggtccagagccaaactctccttagagcgattggtccatacaaaatgcgacgctaggccattgactcgcgtgtcataatgtcgtgcaaagtctccaacacctggtcgttcaaccttgatgactcgagctccaagatcggcaagttgtcgcgtgcaaaagggcgcagcaatagcttgctcgaggctaaccactgtaactccagcaagaggcagaggcctagagggcgggttggaataatgacgcgatatgagatgtgattttcttgcatgttgaactacaccggacagggcttgtgatcgagaagtaagtgagaagaatgctttcattgtgggctgggtattagagcctgtcgttgcaatgccagctagttgtcttgtgcatttagaagattgatgcgaggtcgaattcccgaatgcataactccgtactccgtactagtcggcgcggagatacctcggtcagattgccgggagtcggctgtcggctatggtcaggtgagctgtgattggatattgttgcgcggcagtatcttagtcatccaccctcacagtcttggaagatttcaaggtcccttgttgtatgttggttgtatcttttaacttgcctatcatattcaaagcccaaaaaatcagcctttaaattaataaataataatctactgcgtactaatgaaatgaataagagaagttagtactccgtacggagtacatggttcgtgaaggcggtggtaggggcggtaaggtagtatccaatgagagagtcatgaaccagtggcctactcgtcgcccgaatgtcgaacacgaactttgaactccaatgttgtacaactctcaaaggaaaatctcccttttttggccaagctccgattctgataaacgccaagcacatcgaaacccacgcgaggcgcccaatgcaccaatgcacacgggaaaatttgtacttcgtacggagtaccctgtcggtgcaagttaagtgccagggactcccctggacaacctcgtattctcgaaatgtgtctccttttcgcctcatacccatacgataaatgtcataacacaccgatcgcgatcagatgagaaccgatggttggtgttccccccagcaaaggctgcctggcatgtctccaacggcgggttaaagtaggaaacccccagtggtaggctattttctttttgcggtaacactctaattcagtgtccggtgtgatgaaacccagccaagatgtcaatcatgcgagagaagagggaacccatgtcctggctacatcaggaaccggaaattctaccgtttctctgcatcaagcagtcatcaccagctctcaagaaccactttcccccgggcacaatattcaacatcaaatatggcgctggtcactgcagaagaagcgcagcaatgggccacgattccccgtgcgtctatggatgaggctctgatggcaggatcggtttcgaaggcgctagaccggcaatacaggaatggcttttgtgatctcgtggatgctatatttccgaacatttattacagctacagcactcacgtggaactaccttgattcgagatcgctcagaacgcccgtggcgcacgaattgcaatggaataggggtttcgcagccttgggagcttgcagctaggcatagtaaacggcgatcaacgaaatattcttgccagtcgagaaatatatggccgtggactgcgctatcttgttcaagccatcaagaatccagctacagttggcacggatgacaccccggctttcttgccaagaccaaagctctagtcgcctcctcccgaactactaatgcggagagagacgattcaatgagtgcaatcaacaacagccgagagattctgggcgatgtgaaaatccaaataatggctggtgtgagggctgatcacgaagggaataagaaaaagtgtgaggctttctttctttaaactgattccgcgttctaccaagaatgcatcggtgggatccactctcgagggtgttcattcgaccattgcacttctccgatagttgtcgcttgtactagtgtccgatcgcagtcgacaaaaaaaaaagtaacaccgtggttaaaactcagtccgtataagaatgagtggaaggtcatcaaaagcgctaccattgcacgcatttcccccgctcggaattatgacaagacacccaagtggcattcaagtggcattccgaggttgaagcgccgcatctagccctttgtgtgattaactcgcaaattttccagtttatcccgaaagatcgacggactgaaagcgaccgcactgtcttgagaaactgggcagttatggggatgcggtcatgtgcgacgatgcatcccaagatcatgacgggaaatgacattatcgcagcccacatgaggggggagggggctgggtcccattgttacgaagcaatctggagagaaggaacttaatgaatgttcgacgttgggaatgctggggatgtttcaaatccggcgatcaccggatcaagagaggttatgacatcgcagtgaagtaataataatgcattacaagccattatcattctattcaattgctccactagatcgaattctattctctgattattatattgattgcgtagcctttttcccagcctcgtttcatacaaattatgtacactctcaatcgcggtcttagcgcaatcgcggtattcagtgtaagctcaaaaaaagcatcgtgataatgtgaccataacgacgagatcgtcctgaaacattctttcctagcactgccccgtagaaccatgtgagatccagattgcacaaagcacaaggtgtcattgattgttcctggaggaagaatgctggggcggttttgtcacattttcgaaaccggcgatcatccccggggaaggtaagttgtcgtacaatggggaatacttgcatatgtactatatcctccatacatgtgattgatgtacagtctgccctcctcagctcatgtctcgctaatgtatgcttgctcgaaaacgcaacacaacacgggtacctggactctttgcgggtacttggggcatctcaagattccagcccccggtgcttgcgtggcccctgcagtgttcatccattcggattggtcacaacgcatgctaagcattctgctggacgccattagaagcttggctagccattgggagtgcttccggtggaccattaacgtcatacgaatctggattgtagcgagtcgcctacaagtgccgatcagaatcggcccaatcatcgtcttaaccaatcctccacaggtgtcgccacagcttgcgtgatctcgatttttgatgtttcgagaagcaatctattcttagtttaccaacgtctgcaaatgacaagagcgaccgagggatatatatatagaggatcaaattcgccgcctagctggttaccgcattgctagacttaccaactaggttcaccatactactttgatatacgttgtggacaaaatcaattctcacaatcaaaattcatctcatacattccctgtcatgccgtcctcattggcttctagcgagcgctctggctcggtcaagtcgcaccacagccccaagacttctcttcagagcaaggccgatcctaacatggccctacatgaatcagaacctagtgtgtattcccgccaaaatagttcatcttactataggacacccactgacaggaagtagccgccgtgaacctccaacctggatctcgggatacattctcgctccgaagcatccagcataaggaccgggaaggaaagctcatcagtaagtcaccgagtacaattatgttcgattagaactgcattctaacctggtgatagccgatcccgatctctccaacccaacacgcagccgactcgagcgcccgctcgacacaattcgatcgtttgatgcagccatcgatgcacatcgcaaacagcaacgaatataaaggagggatcaggaccaagtaattacaccaggacgaaacgaaggaacgcttcttaatgccaatctcaattcgaacacgaggtgtcgatgtataattaatgtgtataatggagtcacatggagatatcgaaattcgagttaactattctttcatctgtagcggggtgtggaaaatgagcggaaatgtagtctctggccatttattgcgacatgtaaattctggttttaaaaccacaaacccatgaagaccgcccagaaacatctatgacaattgccggtgtaggccttttagtccactaggattatttacaatttccaaagcatgattactactgaggggaatttacaaaatatatattggagggagtgagatccccacaaaatcaacagtcatgtatgttgtataagattctccacacatgcccattcgcaaagggtattgtgcaactctcgaccggagtttgccgttgtgaacttatatagaacgaagtcggtcggctattggaagctggcatacattgcaagcatggccgaaggagcgtagaatcggagaaaagccgacttgatctacatgtcgatcttttctagactacgttggcccgaagtatacagcaattcctaaagatccccatcgtggattgtaactaggttattcttaacttgctatttcccacatgagccctcataaccctgaatctctgcgacagtctaattacgcatatgaaagggaagaatgacatgcataaatacttgtgcatagatgaatcggccatatagagaaatcatctccgaggtgattcaagatcttggacagttttctttggccaataatattattatttcctagggccaagcaattctgtagacagactatagcttcaatctacctagcgccgaattaaattagatcttttgaggatagaaaaaaggagaaagccacccaatgtcggcgctataccaagaagccccaccacgcaccgcgtcagctgaattttttttaccttttttttcatttcaactagtgagggaataactgttaatttaagattacttttgatggctgcctatttcaatggggaaatgcatacgtggtagtgtctttgtttgcagatcgacaaagaactgccaaagccaagtccagttaagtacgtggagcctatccatctctctattattattcgttcggactacatgaaccgattcgctctcgagccctaataatgttctttttgagagactatctccgggaaaactgccatggcgccagtggcctaaacctattgaacgatggcttcaaagcacttgaccatattgggcatgttagcttggctatacgcgtccttttcgtggttttagagagagcaaatagaattggactatctgacactattaatcttactattaatggatttgaagccatggattccccccgtctttgaccttgctctcccatttcaccagtcattattcactcgtttgattccttgattccttgattccttaattctctctctatctttttcaatccaattattccaactacatacattcgctataaacttttgcggcatcagctccgcaagaccattcatcaccatgaaattctccttggtggcactggcaaccctggctggggttgctgttgctgatttggatcccatcatcatcaaggtactgtctttatacatgttacatgtattcaaaccgtggtgtactaaaactgtcaatagggctccaagttcttctattctagcaatgacactcagttgtaagtccgaatgtatcgatgtatctcaaattcggtgactgacaagaacagctttatgcgtggagtcgcctatcaacgtaggtcgtttatgcagtcacctcaacatcccgactaacctgtttgcagaggaaagcacgagtagcagcggctacactgaccctctagccgatgccaccgcgtgtgcgcgtgatgttcccatcatggctgaactccgcaccaatgttatccgtacctatgccatcaacgcctctgctgaccactcggcatgtatgaaactcttgtccgaggctggtatttacgtgatctccgatctgtcagaccccgatctatcgatcgatcgaaacgatccttcgtggacaaccaatctctttgcccgatacactagtgttgttgatgaactggcccagtacaacaacactattggtttctttgctggaaatgaggtttccaacaccattgctacttccgacgccagcgcttttgtcaaggctgctgttcgtgacaccaagaagtatatcaaggagaagggctaccgatctatgggtgttggatatgctaccgccgatgtgtccgacatccgtgcggacatggccgactatttcgactgtggagatgccgaagatagcattgacttctggggatacaacatctactcgtggtgcggtaattcgacctacgcgaaatctaaataccaggctcgtaccgaagagttcgccaactactccgtccctgtcttcttcgccgagtacggttgcaacgaggtcacgccccgcgagttcaccgaggtgaaggccctctatggcgataccatggcggaggtctggtctggtggtattgtgtacatgtacttccaggaggctaacaactacggtaaggaaatgattcctttcccacatatatgttcgggtaactgatcagacttttaggtctggtctctgtcgtcgatagcaccagtgtcaagaccatgtccgacttcaaatactattccagtcagatcgccaacgccaaccccactggtgtcaacaaggcctcctacactcccaccaacaccgccctgcaaagctgccctaccgtcggagccagttgggacgccaaatcctcccctctgccccctgccgccgattcccagctgtgcgagtgcatgtacgatgcctccgcgtgcgttgtcgccggatccctcgcctcgacgaagtacgccaacctcttcagcactgtctgcggctacaccgactgcagcggattgacagccaatgctaccaccggcgagtacggtgcttatagcatgtgttcaaccaagcagcagcttgcctttgccttgaacaagtactatgttgagcaagaccgtgctgcggatgcttgcagcttctccgggtctgcaaccgtcaaggcctctaccaaggccactggcacttgctctacacagataaaagaggctggaaccgctggaaccggaactgttactaccgaaaacactgcaaccgccgactccagctctgcttcctcgacagcctcgtcgtccacgtctagcagcggcgccatcagggtgcaccacagctcatcctttggctctttccaggtggctgcttacattgccactgcactcctggcgggtgttggaatgatcgctctgtaattcagtagatcttgatttttgtattttcttcgcatttggaccgtgtgtctgttatttcttttcgttccgacatctctgatcatgaagctcaaagcaattcatgttcgagctagcgagaagatagcattacttgcaccttttcctgattgattatcattgctcgagaaagaaattgataaccatcctattgaagcgtgcaaatcgttaagatagaatctgatttgtataccatttgttagccatgtctttttagcaatttcggttttagttctagtcttacaagcctcggtctcctgtctttctcgcattcttttcttctaaatcaccaatattttgtgtggccattcattgacgggtcgtcttactagtgcgtacccccgaccttcatttgatgttgtacatcgtgttttgagcccaggatgcagaagcatatcacccaagctctttgatgtcaccaacgtaaaattatcattaccttctcccagtctccccatccaaatgcaacataccgatatgctcactgtttattcttctcggaattaatttatattttgtctgaagtcaccccgggttcgaggctgcttcaaatagagattatttatatcatttgctgaagtatttatttatatcctcgaaaagagtcacccctggattcttgccatgtcatatactgctgaactcggatggaattcaatggcacctcatcctcagacccatcgtcggcatgggacacctccagctgtgttctggttttattacgcggctcattcgccggtcgtagggcagagttatccaactcataacctttagattggtcgagatctgtagttcgtgatctagtcccagaccggctggagaacttggatgaaaatatcatgaacagtgggcgcagggtcggcatgcaagcggagataatacccgttgaggattcaacgacacaccaggtgcaggatcttccaagtgtccaggcaatgtccgtcgggtcgaatccaaaaatggtagcgaagcgataggcactagtgaagacaacgctaagggagagcagcccggttagtctatcgtcacaaagtagtaatatgtaggaaatggatatacggacaaactacccaagagaaatattccaatcacggacagtcgatgcgtgaggcttgcgtgcagtccccacaccaccttgaccggtagagacagaatgagaatgtcggtgagaatgttgggtactgcgttcccgatgaacatgcctttaaggttgatacatttaccaggaatgcgcgtgtcccaggctcgcgggatcggattgcattggaagacgctcacgaggataatagcgacaagccaggagagtgtcatcccacccaataccaaggaggcgatgcggatttccctcgtggggaagatgcgacagtacatgaggaggatagaaattttggtggttgctaccgttgtgacgtacatgatctcaaatatcagtagaagctacttggatgttagcggaggtatcaactgtatcctctgtaatttgaatcggacctttgcaatcattataatgtttgctaacggcaagacctgagaatgtaaacccatgccataattagttactatcaacaattagcatgagaatcaacaacctttaggggaaatgtgtcgtacaagatagcatcaatccaacgagtgctaacaaaggaaagagagcgagcacgataaaaaagtcgtccaggcctggctttagtgatttcttccaccgtgcgagaaaccgtaaaatcacaaacaagacgcccaggacagtcatcgtgatcgtcccggcccgataggacccttggtagctatcctgggcattgtatgcagccatcgtgttgggacgttcgaaacaggccaagatcaaggtgcggcaatgcttactttaaagagaattgattcctctcatgcagcccccgaagcggcaaaagagacttgtcagagatgatccacttcaagtgtcaggattcatggttatccactattgagcgacaaacggtatgcctaatgtgtgcacgattaatattgcgaggatcaatccgtattttaatactctctgtgttgcaactagtaagaggactgcggaatactacggaatgccaccgcaacaaaattcgatgtgctttggtgcgtaacattttgagacgaggggatcatgttattcctccagtcgtatgattttcattatttccttcgtataggtttaaggttcagtcggccctgactagatacagggtttagtacattaggctttgggtctgctggtacttgttatcatatgtaacacttggacaccagttcctttcgactttgcgctgttgctgaataaaatacaagttgataggagagaatactgttttacaatgttgtacggagtagcacaggaaaagatatccgctgggaactccgggtattctgcatatccctgatgatctgcatgtcaatatcccacagcaaatcagaagcacgagaacaacgaacagaaaagggtatgctccgtaaataagaacaatggcaggaacaacggccttgttcgatcctgcgaatgtccgcctagcccgttgtggatcgaggcctctgccaagattggaaattccggcgaccacgtggatactggttcgaagaccccaatcggggccctttggtgcaatatccgaccggtctaacggttttgctagtgacgccgggaacctataacaaggtgaatctcagtcgggctccatcgttggcccaagcagtcggaatacttcaaggaaattgattataacaatagatccaaagagccaatcgttccacgtaccgaagaattgtgggcccggtataacctgcccagttcagtataaggagagggtgatcctttcgccggggtttgctgattccccagaccctggttgggcgtagatgtacggagtgttttcccaccccaattacacgatggccatgtttgagaacccgttttcgtcttcgcactaggcgcatgacaggccgctgacacagtcgacgtccttctagatctaaacgcacaagcgcggacttatttcggcccgtctgtgggcgcatcacaattaacgtctctcaaagaaatggtagaagctggctgctagattttggtggtaaacgactcctgtggcgaaatcgtcggcgccggggttgttgggggcctgggtacacgcagcggtgcaaagccggtcttcccggcgtaatcatggctgcatttgtgacgtcccaggggaaaacggtaaaggacatgctgggcggaagcctcctttcctggatggtcatccaggcgcagggggaggggtgtacacagcatcgcccttgctgccgttgtagtgcgtgctgccatggaggttgagtagtcgtaggaatcatcactaatttgtaaaaatacttgtcagtcaaatgcagacaccagacggggtaaccactaaatagagatatgaggtatcacttactggtgggagtaatggtaatagttgaagttcaatcccgcggagccgtatgctctgagtgtcagtgagagtcgatttggagtgttttcggttcttgaagatcaaatgttgtgaatctttaatttattacccgctttgctctatagatatatatatgcctctactcatctggtaaaagggttcacctctaacttgcaagcacacgacttgatatatataacttccctgctgcttttgtagtccgtcaacctatcatgattaggtcaagtcgcatctctcgtttttatatttctacttcatacaagaaatggcactgccaatttaaatccccgtgcatcctcgcctacagaaaaagacttcatttgatttttccaatgatgaatatgcaagctcgctctaaaaacgcaatgtccggaatttattgagtttccatagcccatacttcgcgatagtgaccgttccaattatacacgttccgacaagaattgcaaatgccgaaggactgtcttcaaagaagtttgtcacgttcattccaaacaggcccgccacaaaagttgacacggcaaatcccaacatgcagatctccagttgagcctcgaaaactaggatctgatttcgtcgtacatccaagattgattgaatggtctccgttgtgcgctccaaatcgcctagtaaagcactggcagactccgcaatagcgtccgtgctcttgtaatatgcctcgaggaggtattccacttcttggtgatcatctacctcatgcggttgacctgcctcccgatccgttaagaacatggtcgccatgtcttcatcattttcaagaatttcccgtagcgcggagcggaactggcgggcgcgctgctgaattgccacgagccttttcttatgattctgcaacccgcgcagaacagagtaaacaacatcttctcttgttgaatcctgcaagctctcttcagcttctcgacggataagaatatgctcggcttcaagagtcgcaatcacagaggcaagcgccgcatccactactcgtagctcaaatgggagtttggataaaagaccagagccaggacagggttggagcctgccctgaaggtctgtcataaagacatcctgcaccttcacgtgggagttttcaattgggagaagaaatagaagcactccatttgtgcggaccaggagccgtaaagtaaacatgctgatgaagataacagacggacggaccaacaaatgcgggattccttccgagacaagatccacgttgcgtagatcgcgaccatctaatccccaccgtttagcaatctcatctctagttcctcgaatttcagattgtttgacggagccatcgacatccaagaccatgccgcgtaactccgtcgcatcatttatgcggctttgcgacagagcaagagacaagttgaacacatcctgattgaaggagacttcttttttcatgtcaggctcccggatgacatgatgcgatttattggggagcgtgatgattccccgtttgcggtagccggccatgttctggatcttatgttgtttcatgcggagattgccggaaagatgatggaattggcgtggtgtatttgtacattttgacaatctttctcttggaacaaaggataaaaaagtccttggagcacatcgatgcatgatatatataccgtctttgccggttgccagtgtgaacggaattgtgtccttgggcaattgtcgatgcactaatcgggttatgtgacttggcgactcgcgtggcttatcatgaggttacgtagttacgtagtaggtcatgggcgaaatggatatatggcgagggcaagtatcattgattatcattgatagtgtgatctaagagagcgaatgctatgacctgaggttcccccctagtggaagaacgttcatccggcaattcggatgatctgcctcatggctatgcttgtagctgactacgctggtctttgtactagagaagccactaaaccaaagccgtgattgaagaacgaatacgaagaaatacgccacattttaagctggtggaatgataggggaaaccttccaaaaataggagatatttttggaaaccaaaatacctttcacaactcatgcacgattctgcagcttctgcagcttctgcagcttctgcgtgattctcttggggtcaatacttcttcacaattgtgtcgatatagttgatattcttgtctccaaatgactgcggcggcttctagttgggacacgagtcgttgacaaagccgctgtatgaaacgccctcggatatagtccggcggagccaattgtgaggaggagcgagccatccgtcggtggataaaatgcggaggcatgagaattttaaagaatggatcaaaagatgtaggtacacgaccgagatactgtacggattagctgggactgatctggaatctcggcattggtattgatgtcggcatccaaaagataggttgcgaaggccgtaagcacagcgggtgtattggccacggtatagttgcttatcttgtagtatatatcgatgccagtgttagtgctgaggtcacatttacgattcctgggtggttgaacgatgatctggcgtcctcgggtccacggtcggccaaatgctgagtcacccaccaattcaaccgtccgctaaacacgctgacgatagcagggtagcttgttacaggcaagggaaacttcagtatgactacgtcaatgcttcccttctatcatccattgtgctcttcaagttggcgacaccaatccactctgacacccatcatgggcaatatcatctagccgaaagtcgatcccctccctgtctacggacatgacctgacgggtaagctcatcgtcattaccggtgccagcgctggaatggatctcgaaacgaccaaatagctgctgcgactgtgcgcctcgattatgattctcgccgtccgcaatgttgccaggggtgaggcctacgcaacttttctccgccaggaccgccgcattcaaacataacccgggggcgatcatgaaggtcatagttcttgatatcgatgattttgacagcgaataacggctcacgaagtagctccgcgagaggtttcggtagtctatatcctcgttcttaatgcggctatcggtctacccaagctggaacgcagcgcgagcgaccataaccgaaccactcaagtcaattactacgccaaagtttgtttactgccgggctaatgccgaatctagaggggagtgcagagaagacaggctcttctgtgcgtattgcctgggtcggcaatcgcgcgcacgaggccataagcctggataagaaacctcctaccaagcccgatgaaggtctacttgcgcatatggacagcgaagatgcctgcatcccgttccagcgctatggggacttgaagcaaccttgcgcgacattcatatacagtttagcgccgcggctggaccccaaggaagtcattatcaacatgacgtgcccgggaatggtgaataccaacatgcgcgacgttctccccctacatatgcgcttgattgtgaatcttgtcatgtccttccgcgccaagcctatcctgcatagtgcatcctgcatagtgcactggtggcgggccccaagtcacatggcaagttcttgaacgacaagaccatatctgagttggtaataggctttgtcgttccatgtcaatctcgttttaatgaaagctatcatctgattggaatgttgcagggtgaggaaattgcgttattgatatgctcgtatgcgtgcttatccacgtgagctctcgctcaatggccgtgcctcgtggtgcagcagcacagtctctaaataggagaatgccaattcctactctgtaagctcgcgagagatctggatagctggtggcatcatactttggagttagggatgaagcaggcctatcggagttgctcgtagaactgacatatatttaatggcgaggatcacgcatcgagatcagaaattatggcatgggaagtccatatctaagccgagtcagttcccttcatcattgtactcggtgaagtcgctgtccgggctgcgccgtcaatattaattatgtaatcatgtagatgtccgatgtacaaggcacaaacggtagaccacgtgactagacgtgagtctcgaatctacgttgtgatgtcattttgcctttacccgtactccgtacggagtacagagacggcgattatgctttgattgggtcaattaatatctgaagatctcaagcagaacaagcaatgaatcacattgggcaaagcttggcttggtttatcgatcagcatctctcggacataatccctcaattaccggaaagagtatctccgagacccggatattctgtatcgagtaagcagctcaagacttacatttacgtcaaataagccttcgtgtcaccgtttcaaaggccgtctgtcgattgacaactgttacagagacgcataacacatacgttcggagacattgtggtatacccagataatctggaaaggcacatctccgacaaggcagcaacgtctcacccatgtctagcgccgtcgcaaggacttcctgcgacgaacaaaggaaaatcaatccgaaatcacagtcccttggcaaccctgaaaatggaaaatcatcaagacaacctctctccagatcatgacgaggttgaaaattctcgcgctccacagcgccgccgccgaccgcccctgtcttgcacggtctgccgcaagcgcaaattaaaatgtgaccgctctctgccctgcgggcaatgcgtgcgctcgaagacaacagcccaatgcgtctttatcggagctcagccagatccgacatctgatcagcgacgcatgtcgcccccgcaattaccacacggtggcgtagaagaccaggccggccggaaaagcggaatgttcgtctttgactcgaagttggggccgaattcgacttcaaatcgcgtttcaaagcgtgctcgttccgatgagctacatgagctccggagtcgtctgcgtgttttagaaaattcgctcggcaagtcgtctcatcttcagacgcctgagacctcggtttgtgatatattttctgaagtagatacggccaatagttctgagaatgttggtgttgatgaccgcgtacgattcttgccagattcaagtttccgcgggaagaagaccaagactcggtatttcggtcgcagtcattataccaccactgtttcctttgtgagtatcctttattgcgttgtttggttgatttgctaattagatgtagttcaaagatattggtacctttatgcgccgtggtcgttgccgcggaggagcaaaggataaagagtacactgatatgaaacagttcaagaccgagctttggtcgcgtgagatacaagaacatcagcgcgactttcgcgagcagcctttcatgcttaatgaactggttccccggcgaaacgttgcagaccgtctgcttcagctttatctcgacacttttgagaccacgtatcgaatcttgcacataccaaccttcttgagacagtacgctgattactgggccaacacccagccaaccgacatggccttcgtcgctcaattactcgctgtgatggctgcaggcagttgcttctatgtcccatctccaggtcaagaggaccgagacatattccaaaaaccggccatgaagtggatcatggctgttcagtcatatatctcgtgcacatttctgagcccagaaatcgacttccgaatgctccagacacagactcttcttttagtagctcgcctgggagtcgccagtgatgcggatgtagcctgggcctcagccgggtcgttgattcggtctgcgacgataatgggtctgcatcgcgatccggctcgtttccacaaggccaggccattctactctgaactgcgccgtcgtctttggacaactatcgtcgagctggatctcaagttctccctcgaccgcggggctccaccctcggttgatctagacgaatgcgactgcgatccaccgtccaattgggacgatgcggacttgataccagacatggaggataatccagctccgctcagtactgccctttatacccaaagcttctaccaaaccctcctcgctaagaccctcccactacgataccgaatcgcgaagaaaattaatagcctccgatttaatctatcatacgacgatgccctgcgaatgggtgatgaactctcccgctccatgcaacatgcatcctcccttttcgaagataattccccgagtattgctctgggagaatcaggacgtcaccgattcgcccaatccctacatctcttcatcgtgcgcaaattccttctcgccctccatcgccccttctcgcttagtgtcgtacgcctacccaaatgctcctattcccgcaaaatctgcctcgaagaatccctcggcattctctctcagatggaactcccccttgcgacagagaacatcatttacccgaacattactcaactgggaagcggtatgttccgtgatgaaaccttccacgccgcaatcaccgcctgtgtggagctgtcccttcaagccaatgaaatgagtatgtctactacatccgggatggatggtgtcaactccagcgtgctcatgagcatgatccagtcccaacagggcgtgatgctccaggctgtcgagcgcaccgctgataatttcgggagacgcattggccccggtgggacggggtgcaagcctttcttctttttgaatatcatccttgcttcggtcaaatcgcgcgtcaagggggaggatcctttgtgtaatgttgatacggcctcgaagaggtccgttcgcatctgcagggcgatcttgaatggtcttacctacgaggaagccaagattagtgttgataattgccccgctcaggttggtatctccacttatagctgtctgtctgccacacctaaccttcctgttcagacttctattccttcggggacgaatcctgccccagctacaccacgtgatattgaccctacgtcgcttctatcgaacgactttggtgacttcacggtaagttggcgctccttggatgctgtttggggctctgctgacctttttcagccaacggatctaggaggctggtttgatggattagattacactggcccagagttgtgggattgggatgccgacttgtctggaaaccttccaacattctcatgacttatggagctactccctaatattaatgactgatgcccggtgatattgcttctgttcaatgtcattctcaaactctactctcatctagtcaaagaatgactttcgtcacagtaaattgttagaataataaatatgcatatccttttggcttccaggaaagagataaaaattgcaggaagaagattaacaatcccacttcctcaagacaccacaccccggaagatatagagaagtatcaacagaaatgagatgctcaatattctcttaagtgaactctgtccgatataacaaaggtgaagataacattagtaaaaggaatggaagccttttcctcaaatacaaatctcattctgacgagctctcttaaaagacttaattagaaatacaagaaaacatctaaacatctaactaaaacatctaaaacatctagaacctaactctatagaacgacaagccaatcaaaccctcaaagcctcacaacttctctatctctttccccatttcttgaccgcgaacaagcccgatcaacacaattcttcttcgaaatcgcaacataactctgaaccaatctatccaataacaaagattagcagaaatcccagatcaagtccagaagaagaaaactcacgcctgataccgctgaatgttctggatctccaaacccgctagagcccccaatgaatcctgcacatcctgcaccaaactcacacaccgtcccatactgaaatccgtcctgacaacaaccctcatcatccccattgtctcgcaatccgcagccatggtataagcaggcacaatccaccccttctcgcgcagtttacgcgcaagcgcccattcatccaagaagacgttttgcgccgaactcaacctgaacgccacgaccggtaggccatggccaccaccttcactcatgattatgaaccccatttcttgcagctggctggtgaggtagtcggctgttgccgtgagatttctcatgatgcttgtgtacccacttcggcccagtcggatgagttggtagtactgtgcgatgatatgggatgctggtttggagaagttcattgtgaagttcacttgctcggcacctaggtagtcgatgttgaaaactagctccgcgggaaggtactctggtgatcgccagagggcccagccgataccggggtagacctgtggaaattagcatattgagtttattagagttggacgatcaagggatacttaccagtccgtacttatgcccagagacattgatcgagacgacgttgggtaatttgaaatcccatactagatccgggttcacaaacggggccacgaatccaccgctggcggcatccacgtggatgggtgtgtccagtcctctctcaaggagaagttcactgatagctcgtacatcttcgtactgccccgtgtatgtcgtgccgagaatcgcgcagatcccaatggtgttctcatcgaccatgtcgacggcttgaactgggtcaatcacgtatctcgtctcagtacatgggactagcttctcggtgatatcgaagtatctggttgccttttcccagcatacttgtacgccgctactcatgatgatgtttgggttggaggcatctttcccctgggtttggcggttgatttgccagcgcttcttcatcgctagaattgcaagcatgatggcttcggaagatccaatacatgatgtgccaaaggcggttggagttccgtcagaaaccggggaatggaataggtcggcgaggatgttcagacagcggtgttcgatatcgacagatttggggtattcttcgtgatcgatgatattcttgttcgaggattcggcgagtagtttgagagcttcgtcttcctgttacagtgttagtatgcgtcaaaaatatgacgagaagctgaaataccatgtatgtggtcacaaaactggcgaggctatattgagcaataacgttagttgagttttcaaaattttgacaaatagactcacttcaagattggctgaccatccagggccaagtcatctttgatcagctggtaggccacatctttcggcatcccttcatctggaagccgatgcgatggcataggtttggcaacgaaccgggagccatagacgtaagagcagtcgctcgtctggtcagaaagctgcttggataattcctcgatagaacccattatgtaatgaaaaatgtagattcaaattggaatactgataaactagcaagacgttcttgactttatattatttctcgcaagtcaattgttgcgtactggaaaaatatctcatagcgaaatcgtgtgatagggttatgaggcatttacacgagatatcatgatcaaagctatagtcaaaaggaggtttgagcgccgtttcaagttgggttttgcgttcgtgtctgtagtttgaggtatatatacatgacaacgtgatgatcgaagcttatctatatctgagtattccatgtaagacaagccaagaccttctagaaaacatcagaatagactattaatacaacagtttaactaactccttgttacaaagtagaattgggagtgatccctgccatcccttgttctaaaattggaaacattctaaccctacggagtagattacggacagagctaatactggacaatgcaaataccaaacatgcgatttactccctttgccacatttataaatgaggcttagaagcatctttggcttcatggttaattagcccctgactcgcaagggaacgttcaaccttcccacctccgcgggtgcggcgggccgaaaataggggtggcgcagccacaatatgtagtgtttctcacatgcattatctcgtattattattacaggcagcaggatattgatttgtggagatgagacgataaggtcgtcaagctgatagtcctggagtggtatagttattctactgttttgactttacattcatatctattgtaggagtcgcgagcatatatcgtgttatccctatttgtcctaacattttgaaagtggaacttccaatatttattcgacgcagtttgacatgctaagcaattgctccctatatgtacggagtatatgacacgtaaacagagcacccccttgctccggggttcatgcaagtcgtggatgaggtcaacaagattaggctcagacacgaagaagggagcattcttcaataatggaatcgtcgtgtcggcattcgtgtgatttacaaaagcccgtatcgccattctgtatcctgttcataacatcagtttttcgcttgcgggaacaggatgctgcatccaattctggatgttagtagtgttaatgttatcctctcattatcgggtaagacttgaactggcatgtctaggatgttctctaattgatagttttaggaatatacgtcttggtcttcgggtttatcgctgtgaaaatcaagcaaagatggtatctcggtgaagcttgtatggtgtccctcaatctcactagatatcggtcgctgatattattcagtaccctctttcataatcggagctgtcctaggaccattcggtgcgaagttggtcaatgtcggccagtggggaggatacactgacagcggtagtggtgatattgcctatgtaggtcctctcgccacgaaagaaaacactaagctaattatactagggattgacccgagtcgtgattggcatcgctatggtcaaagtcggctatgagctaccaaaacgatacattcggcttcatctggtcgaactaaccatttgcctattgccattgatgacgatccagtggctgatgacgtcggcatgtatcaaattaatgatccctaatctatcgtttgtgtgttcatcttatcatatttgacatgagaacacactcccactaaccttgatgcagttgacttccctcatcatcggatcatgtgtcatatgtatcgaccccgttctctcacaggctatcgccaagggtcctttcgcagatcaatatgtccgacgacatcttcgtgaatttatttcagccgaggcaggtggaaatgatggactcggtttcccatttttgcttctctcaattgcccttcttcgttatgctgatgctccgggtatggagacagtaaaagttggtcctaggaaacagagtcgagattggattagtgagccgagtacgggtcggtttggtggagatgtcggccgagctttggcccattgggctgttgagggagtgctatatatgcttgtcatgggcgctgggtatggtgtgctggtcgggttcctgagccggaaagccttgaacttggcctcgaaaaggtatgcacatatatactatcagtttaacaaactagctattgacatgagcaggcgttggattgacaaggagagcttcttctcatatcctgttgcgatgggtgtaagttattcttgagaaagatttggagtttatgctaagaaggcttgcagttgtttatcgtcggtacctgcggctgctttggctccgacgaaactcttgcctgctttgttgccggctgtgcattgaactgggatgggtcttaccacttcgaagtcgaagagagacatgactctttcaactcaacaatcgaaaacattttgaacgttgggaccttcatcttcctcggcgctatcatgccatgggatcaacttcacatgtccagtcagaatggaatcactatcgctcgactattcgggctcggatttttgattctgtcattccgtcggatcccagcgatcatgatgggatatcgattcatgcccaaagtctgcgataattggaaagaggccctgttcatggggtattttggcccaattggtatgctatccaaccaagatgttgagtttttatgttgaagtgcagtgcttaccggttttaggagttggcgctatctcctatgtcgagtatgcgcgacgattgttaccggaccctggagagagtgatacagagatcaacaacttgactgcagccatgataccgggtatgatatacttctacttcaagataatgtaaactgacctttgatttagtggtatattggcttgttttcttctctatcgtcattcacgggctctctatccccatcctgagctgcctttataagtggttcaaaatccctactatccgagactacccggtagaaatcattcttctgtccgaaaatgagcctgttcctaacaatagcgtggtgaatcgccgtaaccactctgttatattaaacaaccggttttcatgtaactcaaaccagcacccctattctgatcatggtgaggatcatggcgagggaacagacacgatggtattgcgtcgtcgcagtggggaagctagctacaggggctcgctagaaaggacattgacgaaaggttcgtcgagcgaactggagcagactgtatctgctagaaatgtagtctgagtggccgagaccggggattgtatattaagtgaatatcctttgacatccttatttggattttagcatgagatagacgcatttcctaccttgaaatgattgaatgatattgtcagcaggaactaattccaaggttaatcgaattgcattaactagattatctatttctcgctgggatgaatatgtcatggtattttaccctactccgtatatatatcccaacctaataaaaatgccaacgaacatgggacaaggccatgtgtgccatatttatgcgcctcttttataataaattgcctcctccatccctccttcccttccacatcaataatattgcctctttcacagcgaccgcaatcatcatctacatgttcctatcttcttacagcgggtcagggaagagtttctcatcacctaaactttaatttcgattcgaaactccgcagactttgaagaaaacaggtccttgtccgattcattacgaattgaacttaaggggtcgcttgatttccagggtggaccccttacaagcctgtaagaagatcgggaggcgatgatttcatgcctcggcccctcgaaactgacacggacataaaaaaggtcgaagggcaatagctcaaggatttcgattctacaaatctctgataatcaaaaatgtcgtgagtgcccatatacttccatgagggggaaacactccccagactaaccctcatagtgcctttgtaacaactctcgggctccgcgccgcccctggccaggcacctgcgaaccacgcatcagccttgctaatggcgaactggtttttcgcgtatattctgacgagcccccgcggcgcaaagatacgcctgggtcttgatcacaatgtcagcccgcgtgaggacttgactacgtacggtgaggcggccgtgcagtcgggaaagattacccgtcgcgcccttgacaagctcaagcgacagacgtcggcgcatgccaatgtgcaggagggatacactttgttcgttgcggcgagtatgtggaactcctttggcctttcctttttcgcacgatgaacttgcatcttgtaaaattgctgcactgtactgaccttgccctctagtgctcgtctccttatacgccggtctccccaatgaaactatcaataccgtcggtgcttggtattcggtttcccgggtcgcgtaccacctattctactgcaacattgaatcttactctttgagctttctgcgatcggcggcttggtggtccgggaacatcagctgtctttatgcgctggtgcaggccagcaagaagttgtagaatagacggaggcgctctttgatttctctgtaatccgataatacataagaacaatacaatgcaagtacatctattatccgagtacgaattgtcaaaacggacaacttactccacctaagactgggtgttgaggtcttggaagtcctccatgcctcgaaaaaccacaacacgattctcatgagaaccttgcatgacaaaaggttccgctgattggtggaagaacccaaccctccagtctccatccccagacgggggaatgaatcccggccacaacgatgaattgcacagtttcgaacaacaatgtccaagttcgcgtagtctcgtccgacactctctccgcatccccgcttgtgaatatccttggcgacccgaggagaaatgactccatttactattagcgacacccgcggacttgttctattgccgcattccataggccctgccgatccagcacgcggtggaattgttttgacaggcggagaaatctctttcctctgcccgtgccattctccggatattgctaatctggggaaaggcacaagctccattttgctatggccaatactccggggtattcttataaattagcaggacttccagcatgactctcctaccccggatcaaccgacagcagtatcaattgatttcattgaccttgtgataatgaagttcatcgctattggtgcggtcctgttcagcgcagttggtgcttttgcgacagaacgtattattaaaggcgcccagatcatcccggccaacgacaaattggggctgaagaagatcggtgcttacggacatcacaagcacgacgaccgtcggacagtgacaattcgatcatcgaagagtgacaccgacgacatttcatatgatttcctttggggtatcaaggctgccaatcatggcggtagacttctcttgcaaaaggggaagacgtatgtcattggcaaaaagcttgacctcagcttcttgaataatatcgaggtgcagctagagggcgaagtgaaggtacataaccctagtactgtgattgattgagccgctctgacatgaatagttcaccgatgatatcgactattggcaggcaaaccatttctactactcctttcaaaagtctatcactttctgggtctggggtggtcaggatatcaagatcttcggaaagggtattctcaatggcaatggtcaggagtggtacaatgccttttctggcctagaagttttggtgagcatgaaaagagtcgggaatgacttgtgctaatagataattcaggacccggacaataccttttaccgtcccattctctttgtgactgacaacgctacccgcgtgtccgttgagggtatcacccaactcaactctccctgttggaccaacttcttcgtccgcaccaaggacgtctctttcgacgatgtctttataaacgcgttttccactaacgcatctgtgggttgtgaatctggttatattatcaatcaattctaatccttccgcaggctttgcccaagaataccgacgggtttgactccttcaacgtggatggtctcagtgtgaccaacacccgcgtcgatatcggcgatgactgcttctcccctaagcctaacacaaccaacattttcgtgcagaacctgtggtgcaacaatacccacggcgttagcatgggaagtattggacagtactcgggagtcgaggacatcatcgagaatgcctgggttgagaatgttactctgttgaacggccaggtaagacctccgtatatcgattttatcggcgagcctaataggaatttaagaacggcgtccgtctcaaggcttgggctggaccggacatcggctttggtcgcattaacaacatcacgtacaaggacattcacatcgaaaacaccgacgcccctattgtgttggatcagtgctacttcgacgtcaacgccaccacgtgtgccgagtacccgtcatcagtcaatttcaccaacattaccttcgagaatatctatggcacttcgtcgggcaagaatggcaaggttatcggtgacttgacttgttcgcctaatgctgtgtgctcggggattcatctctctgatatcgatatcgtcagcccggctgggggtcccccggtcgtgacctgcgatggaattgatggagatattggcgtggaatgccagtcgagctcggcttagattgtgagtatgataatagtttgagagaagaatgatttgaaaatagtcaccaattgaaagttccgactggcacaaaattgaatagcagtctgtggtggcggggatgttgaatattgcttaacttgctcggaagagtagtccgaggagccgtagaggtgtatgtccgagaagagtagtcatctccgagataacatccatccaataacactcccacatcattaccagcaagttttctacggcagattgctcgtaactagtcgcttattctacactcgttctacatctattctgcacatagccacacgaagctttgaccactttttcgtctcaacatgaacggtcaaacagataggcagcaaatttggagagttgagactcctcgtgatctttcttccccagagaaaatagaggttgatatccgggcccgacatttctcaaaagccaaagcagaagagactcaaaaccaagccgtcaccctcaatgacaactcgtcatgatgagtaggaccgccctcatactgggctattctctctccacaccccacaccatcccacaatccgagtggtacaccggctgagactatatccaccccctgtctttagccaggatgtatcgtgccttgttgggaatggcctatgattcggtattctaggctcctacatgcaaacgcgtacagtacttgcaaatcactccaatccggggagatgcatccacactatcctcctttgccccacccccagattcccataaaggtggagtatggggaaaggatgggatacatagcagatgttacggggtatctgctataagaacgtgggcgtatagatactctgcttttttcccccttctcttcgtccgtgctattatattcccacagaccctggccttcatattcaacggagaaaatggataggaggcatcattatattaagggtgcaaatacccgtgaaggagatgagtctggaaagccatgtgcattctacgtcgaagacccagtcgctcatctatccgaggaacatcgccaatatcttctttcgaagcatggaacactcgatttggaacctatccctgacatgaccgataccgatccatacaattggccgcgatggagggtgagaggccataactcctgccatccattcacattttgaccatgtttctaacatttttccttgatagaaaaatttcaacttgaccctagtcgccttccacgctatgatggccacattcactgcctcgtcgatccaatctgcattcgaaaatatctccgaggacctcgacgtcagtatgcagcgaaccagctatcttgtctctctcttcatcgccgtgctaggcggcgcgcctctcttctggcgcccgctgtgtaatcgatatggtcgtcgccccatatttctgatttctttgatctgcagcttgattgggaatattggctgtgcgaagagtacttcctatgcaaccatgggtctctcccgtgctattactgccttcttcatcagccctgcagctgctatcggtagcgcagttgtcgcggagactttcttccggaaagatcgtgctcgctgcatgggtgggtggacgctaatggtgactctgggtgtgccttctgctccatttatctttggtttcgttgcttcgcgtgtgggttaccgttggatttactatatccttgcaattgtgagattccttaaccccaacctctaggatgtactcgtctaactattcattcactccgaacaggtcaacgcaacccaattcctcctctacttcttcttcggatcggaatcactttacgtccgcgggaatatccctaccaacaccgtcatcgccgccaagcagagtcttttcaaattccgccggatcgaccctacaccgttagaattctgggacttcttccaacctctaagctatgtgatgaaaccatgcgtggtcatcccagccgttgcctatgcaatgatcttcctttggggcagtgtcatgcttacaattgagatctcccagatctaccctgccaagttcggcctgaacacccagcaggtcggtctgcaattcctcggtattatcattgggtctgtgattggtgaacagataggcgggttcatttccgatcgctggatgctgatgcgtcagaagcggaccggagaaccatccccgccggaataccgtctttggttaagttatattggccatgctttgacgatctgtggtattgtcgttttcgctatcgaaatccgggactctggcggtgtatggaatatcgcccccgttattggcgctgctattgccgctggtggtaatcaaatcgttactaccgtggacattacttatgcggttgactgttaccgtgaggatgctgctagtgtgggtgtttttattactttggttcggcagacttggggtttcattggtcctttttggttccctgagatgtttgaggttgttggttgggctggtggcgctggtatcgccgttgctcttgtggttggtgtgagtgttattccgactgtcttggttcagtggagaggagcttcgtggcgttgattgatatggccgaggaaatataatttctctttttgtcaactaaatgagagaatgcagatgttttacgcagtagaagacggtgctatccacattttgatttacacaatagtattgggatttggatcatggagttctctgtattcgtggcacaacaggatatggaattgatactggtgtgtaatacgattccggtataatccttctactgaactcgaacccactgcatattaataccgccgagaaaaagtcccctttacccgtgagtagcttagcaatgactgccaattttctatctaatatttctcacttctgttcggcgctgcgtcgggaattgtgtataagttcattagcaattgccatattattatgtcgtagacggcttttagcacgatgcttactcccagactcccagtgcgctgaactgaatacttggaaagtgtgcgttggaggaaagatgccttggcaagggtgaatgcactcattgccgatatactgtcgccaattaccacgttcattcgaactgggttaagagagaaaagcctcggattcattcaatgctcatctttctatcggatatgccccgcagggatcagtcccggtttgcgtggccaatgccaaacctcggctcaatgaactgccattatttggatacacgctagtgtttcataattgccatagagaggggtgctcctgagggaactttggtccattccagtatctggtgacggaggcttcggccagtactagttagggctggggtcaggtgataatctacaacgcggggatgccaagagacatgtgaaaatacaatggtcaaacgaaatgaatgctgtgaaatgaagatgacataagtgtcgatctatcgtcgatccctgtggggaagtctatcgcagtggatttcctttagtgcggaaggtcgaaaatgtgaagcctcggttagaatgggatatcctaaatgtgctaaacgctgttgatgaactatataatccgggaatcacccctttaccctccgacataaaatatcccctcacatcatccaattcctcccaaacagcaacaatgtctacccttaacctcatcgccgattactcccaaatggttctatctcaccttccaggacccacccgacatctcttccgcaacccaacagcccaaaaggccgtcggaattctcgccgccctcaccttcctccgcgccacaaacgacttcttttcaagacgcaccctacaaaactggacttccaaccaaccatggatcccggcacgcgagctcatcctactaacgggtggctgcagcggaatcggcaagcaggtcatggaagacctcgcgcgcacaggcgtgcgcgtcatcatcctcgatattaatgagccaactttcacactgccggctaacgtcaccttctacaaggcgaatgtcagttcctcggcggatatcgcgaatgtcgcgagcacgatccgtgacaatcacggcgagcccacggtcttgattaataacgctggcgttggacacgagggggcaatcctcgatgaatccgaggagaatatccggcagactttcgaggtcaataccctctcccatttccttatggttaaggagttcttgccggctatggtgaaggcgaatcatggtcatgttgtcactattgctagtatggcgagcttcgtggctctcggtgagatggtggattattgttgcaccaaggccagtgcgcttgctttccatgagggactgcggcaggaattgaagtattggtataatgcgcccagtgtgcgcactaggtgagttattctcgggtatgtatctgtagattttgctaattattgctttagtattattcaccctgcgtgggtacgtacgcctatgatcaagatgctcacagacaacgaggcgcacttcagagagtctatcatgaccacccaggtcgtgtctgacgctatctgtaagcaaatcttgactcagactagtggccaggttcttctgcctgccagtaagtcggtggctactttggtgcgcgctatgccaacctggatgcaggagggtgtgcgcaatttcgcgtcgggttccttgaagaagatgtgtgttctgcagacagaggagaaggcccaggcgcagtagatattcagctttggaaatgactggagatgtgattatgtcaccattttgaattttatgtaactaactaggagatggataactatacgctatctcatcgagcgataatacattgatatataatattgaagttatttcaaaacgccgacggctcctatcttgatatttatgggctacagaagtcaccatcgagacacggaatatgtgtgtaaaacactctcactattccatgtgtacccaattcatgtatgtacagacagcgttccttcatacaatcacaccattaactcggccaaaaccgcctcaaccttcttcccctgctccgtctttgtaacatcgcccagctctaagtgataaatcggtgcaacatgacactcacgatacccaacaaacaattcaacattctcaaagccctccttgaactttgccgcgaagtcttgaatcagaggcaacatgatctcattcccgcctgcggtaatcaataccgagttcaccgggaacgccgtaaaccaatctgccggcgcagtcgataaatccgtgtaatagtcacgcttgccagcaccaatataggctgtcacccacggtcccgcaaccgccatcgtaatgatatcgccatcgctatagacctccatttccgggaattccttctcgagaagggtccacggtgcaatcatcactgcgccgccgaggtttccgcgaaaaggcaggggatcgatctctgcgtgtgggtgggccagatgagagagaactccaccaaccaggttgccgcctgcggagtcgccgcccaggaaaatcgtggacgggtcgcggtttggttgcgaaagaatgtatcgtaggcaattcacggcctgtcggagttgagtcgggtagactgcgattggcgccagcgtataggtcagactgaagacagcgacgcttttgcctaatgcttcaaggtcgtgaatgagctgcgcgtagaatttgaaataacccatgttggcggggagtccgaagccacctcctgaatgatggttagtggtggtcaattgaataggggtctttctttgctggctgtacacataccgtggatccagactaccacattgtcagcattcgaatcacccatccagtggcctaatgctccgtcgcccaagtctacggactcgggtagcccaccggtctccttggagtgttgctcatagatcttgtgggatggcggtaggatgtactgcatctgagtggcggtcagccgcgagctcgccttgcggaacagtgcatatcccaaatgcagggacaaagatttggcttggcgttcggtgcgtcgaaggcccgtcaagagagcatagacataggcaaccacgatggaagccacggctgggaggaagtccagtttctcttttatggagaggttgactttggttactttagtgacagacatgattggaatctcccgctcatgacttgaggccctaagtatattttagcccgtacaagtgtgaaagtgaagtgttgatcctctcgcaagcctaccccgtttaggaaggtgccgaggtttggaaaattcctcggtctccatatccttgagattagctgtatctcctacggagtagtatttttgcatctttagatctctagttctctatacccaggggtatcggggcatagatctacatatcgatatctgtgtagatctcacattcacatctcggagaacgatctgtgtaacttccaaggtcacttgtatatactaacttcaagaatcatcacgtcttacacgagataaacacgtacagagtaccactacgaatcccatgcaactccccgatctccccgtgtacattttaaggttttgcgtgttgtttaccccaaagtcgacggtgtcgatctgccgaataaaggattgtgaaaccgaggcatgtcaacttttttcttaaataacctcaatgctattcgcttttcagtaactgttcatttgatcccattcatccatcatgagtggactcgatgaaacaaacgaagctaggcacttcgatgtcatcatcgtcggcgcgggtatctccggcgtcaatgccgcctaccgcgtccaagaccaactccccggctacagctacaccatcctagaagctcgcgccgatctaggtggcacctgggatctctttaattatcctggtatccgttccgactccgaccttttcaccttcggcttccaattcaatccctggaccctcgataaccccatcgcagagggttctgccatcaagcagtacgtgcgcgataccgcgaccaaatttggcatcgacaaacacatcctctacaaccatcgtgtgtcatcggcagactggtcctccgataaaaacatctggtcgctcgccgtcgaccacaatgactccgaacacacatacaccgcccgctatgtcatctttggcacgggttactacaactacaaggatcccctgaaagctgacattcccggcctggacgccttccagggccaggtcatccacccacagttctggcccgaagacttgcagtataaggacaagacgatcgttatcatcggctcgggcgcgaccgccatcaccctcctccccaatctcgccgacgatgccgcccgtgtcacaatgctccagcgcagccctacctacatcctctccgtcccaaaccgctccagcaaccgatggctctcctacatcctctccaatgccctgtatctcaggttgcaacgcatgatctcgatctatacaacccgctatttcttcctcttctgccagcgcttcccgaatttctcccgctggttgctcaagttgaatgtgcgcaagcaactgcccagccatatcccctatgacccgcatttcaagcccaaatacaacccctgggaccaacgattgtgtgtttgtcccgatggggatctgttccgcagtctccggcagggcaaggcggatgtcaagaccgatactattcgagaggttacgaagaatggtattatcttgaattcgggtgagcagcttgacgcagatattattattactgctactggcttgcgattgcagattgtaggtggcgcggcgctgtctgtggacgggaagaagatcgacgtgggtggtaaatatctgtggaatggagtcatgctccaggatatgcctaatgccgctttcgttattgggtataccaatgcctcatggacactcggtgcggatgctacggcgcatttggtttgtcgcctgctcaaggagcttgagtcgcgaaagttggtcgctgctgttcctcggctgaaggagaaggatgcagctacgatccaggatcgtcctctcttgaacatcaaggcgacttatgtgtcgcttgctgatcggattttacccagggctgcggaccgtggtccgtggcgcccgcgtgataactacttgagcgacttgaagttcgctcagagtggtgatattgagaccggaatggagttcgtgcaaggaccgaatctgcggttacgtccgaagatgtcgtgattgatgcatgtttatgatatgatacctacccatgcattatgattgaggttctttgattcagtgtaaatatggtgtttgatgaggctcagtaacaatatgttcattcctattcttcagctgcgcaatctcccttggtgtccgttggactatgcatgctgcactttcgcacagcgtcacccttatcaactaatgcctatgatgttgcatctatcggattcgcacatacactcatattcccaaaataccacccatgattaggattgggccacctcaaatctcgatccgaaccagcattccccaccttgctattgatcccttcaatatactccaccccgtcagtagtgacctgcaccccagtcttctgggtgatccagtattcgggcgaaggctggctccaatcaaagaatggcagattgagcggcactttcggtatggggtctgtagtatgtgtggctcggtatatgctgtttggcgcttgttggttgctgataaactcggccagcttcaaatttcctggtttagggcctccgaatgtccactggtggtttgtatgcgttagctggaatctacactgcttgcttgttttccaacttgacttacaatatccagactgaacccttttgttcgaagaacagtccccgctaacgccgcaatacctccacctagactgtgtcctacgacactcagcctatagctcggatacgcgttcattgcattgtgaagctgggatgttgcctgagccgctacggcgctccagtaagcccagaacccatgatgggctttgcatccggtgcacacgtcgctaaccgaggtgagagcgatatcgagatctgtgttgccatcgcttttggataccgttccgcggaatgttaggacgatcagtttccgcgtgtggtctagggcgatgtaacctgtcgggccgtgatcactgtggaatgtgtcgattacggttgtgttgtcggctgctacgagtggacagttgccatagtcgcaggtcaaactttggcctgtgtgattgatgttctggtcgcaggccgatagggtggcgaactgtgagaatagggtgaatctttctaatagctccgttgagattgctggtacatttgatcgtcagattggaatttggaaaatttgctttgtccatgtgaggcttaccccggcgagctagttgaacaggagatgcaatggatgtcacgctcaatgatagcagtgcaagaatcattgacccaaccatattggatgatacttcgcaagtacagccaatctatcaaaggcgcctgttcttttgatctctgggaaatgagcttatatttataggtttcttttcccaccgtcaacaacagcccacctatggaatgttgcctaatagagaaggagtaatggccgcaggattcaatcccacgatgcaccgtgatgactgtataacagctgagttattggcggcactaaccttgcacccggaggatgattcgattctagagctgagagaacaaatgattatatgccattgaaacgatcaaaattctataatatgatacatacattccactcgtacatatcctataaaccaaaacattcaaaatatgtcacacagtgggaacaactcacagcgtcctcaatatgcataccagatgagattttctcctttccttcttagcctgctcccctcttgtccattttaggcaaatacatgaatttgtgattggtatgttcttcagctggcatgttgcatatttgccatcaatagcacaactaccacatgtgggctcaaagtgggtaatttctcgaggctagatccttggcgaggtagggatcattcttcaataggtgaagatttacatgcaggactcctatatcgagaatcatgtgaagattactctgtagatgtctcacagtgatgcggcccgcagatcgtacgctaatgcatctacaaccgatagatcgtcggctccaccttgcatctcaatactactgtagtattcaggtggattcgcgcatgatatgagtttgatccaccccgacctccagcatggtaaagacgaaccctcctagtacagatcgcctagggcatgtaagagaaggaattgtgactggacactgcaacgtcaagaaagggaagaggccttggatgctgggcatcttttcgttcatgtatgttgcatcatagccatattgctccgtataatgtttccgtataatcttccagcaagaaatagaatttgactttcggaaaagatttaaggttaaaccacagcggggttgatttcatcaattcaaccagggaacagtacaacctaacattccgggatgatgtaactcgatgacaccatttgatatgtcatgatttgaggagtagctaactataaggcgttgacttagccagtcgctttctcgttttactttcactacaccacactacaccaccaatttaaatccctcagctgtctcgatgccccccaaagagaaatataccgatcccgaactcagggatgaaatcaaaaaagaagtccacaatagcgacaaaggtgggaaaccaggacaatggtctgcacgaaaggtatccaacacgattacactcccattacgtatagtctctaacacacatgcaggcacaaatgatggcatcggaatataaaaagcgcggtggcggttacaataccacaaaggaagaaggccagacggagtctcagaaacacctcgataattggacaaaagaggagtggcagacgaaggagggatcaggtacggcgcgacaggatgatgattcgcgtaaacggtacctgcctaagaaggcgtgggagaatctgagcgaaaaggaaaaggacgagacagacgagaagaaggttgaggagtcacagggtgggaagcagtttgttagcaacaccgcgaaggcaaaggaggcgagacggagggccagttctgatgttgaggatgagagttagagggagattcgaagaaaaccgacgacgagaaaggtggggcgagaaccaaacacaatgcgaagcaggatgcaacaccaaaacagaaacaggatgcaaagtctacagaagataaagcaattcctcaactaagctcggttggctcctctaaatgcgcatttggtcgatgctattgacgaaacaggagcgagaaatccaaagggtaaatagcaaagtcccaagtaagaaagacttacgaatgaacgaaattgattcaatgaaatatcatttcaattgggatccatggtcttgaagctatacttgttttatgttcatatttggccaatcacgccaggatattaatcccaaatcatccatatataccattacatcatcttgacatatctcttcgatacaaaaataatcttttcacttacgttcctcatccacaaccgtgtggggagtgaattcgctatctggcaacatgttcatgctgtcctcctctgcgtccaatttgtaattggtggcccagaatccaataccgcccacgaaggcgaggatggcaaccacggtgtagttccaagtcaagagaggatcctcagccagaccaatgaaagcctgaccaatagcagacgagaacgcgttcatcaggagggacacggcctgcacgagggatcgcatgttctttggggccttggtgtaggcatactcaagagaagtcacggatgcaaggatctcagaaataccacccatgatgtaggtcagggcctggacccaaacggagatgttggtgtattcgtgtttcacctccaggcagtagttggcctcgttaccgcagggtcccagcttgtagatgtagtattgggtgaccgcggcaacgaccatactgagggaggccacgataaaaccagccgtgatacgcttcaagggggtgaagttgaaccccatcttgcgcagacaagggtaaacgagctggtcgaagatgggaatgaagatgatcagcgaaatagggttgaggttgttgatgatgtcgttgggcactcctccaagtttcatggtggccgcttgagacgtcaggttgttcatcatctggttataggcgagccctaaagatggtcagcttgtgtgaatatagtagataagaagtgtccacgtacagtaaagggggtaccacaaaaacactctgcaggcgagcagtcctcgtcgaacttcatcaacccacgcatcatcaaagtccatccacgcgggcttgttggccccgaagttgctgggcttggcggcggcccacatatcggtatcagagctccggaacctacaaggaatcaaggtcagtaggtgtaacattcggagctgacaggatgcggcttaccatcgcacggggttcagggtccagtggcccttcattgccaatttccacaccttgaaagctttggggtagattgaaccactgggaggagtgaggatatattgcttcttgcatatgatcaacaccgcagggcagacgcagaacatggcagtggggagaaggtaagagagccagaaaccaacatatcgctcggcgtagaccatggcgacctgacccacaaaagaaccgatgttgatcatcatgtagaagtacaggtagatacgggaaacggtggcggacgggtcaacgatgacacgctcaccggtagcaagtgtcgtgacatagggtttgtcttcgcgatattgttcggcgatcaggggggagatgttggacttgaaaccacccgttcctacacccatgataataagaccaattgaaaagcatgcaatggctccattggggcttgcaatcacgttgggaatggcggaaatgatgagaatggtgtgtccaagaagtgcgcaggcaatcgcggacaggatggtacggtaacgaccccaatattgatcagccaccatggcaccgaagaggggcataacgtaggaccagaacgagttgactgtgcaggtcacacatattagcaatgaactgaactctcgagaccacattacttacacaatgtcaatccggtcgaggcctgttggcccattcccagagctccgggtgaatcattgctccagttggagacacctggaacgagggcaccggtggtggatcccgtgggcaaaggtcgctgaatgaagttgacgactaattcaagttagccatttatcccctctctctaagattggtagtccatacaaacagcagtggtaccgtagtacgagaaacgttcgcacagttccacaaaggcaacactgtatgctgctatgggtagtttgccggcaacacggcgcaaagtggctagttcctcatctgtaggagaggttttatccagggaataatcgccttcgattgacgcatctcgcagaggaggggcactgtcgatggtcaactcatcaactaccgggcccttctcgttgataccgatagtgtgtgagactgccttggacttagcaacctcagccacatcgacaggatcgctggcattcatcgtggcggtttggggatccagatatagagtgaaacacacagaaaagaaagaaggagaaacctgcggcagggcgaggtgaagcacttatatggcccatggcgtgattagcataacggtttagctcgaggtctccaagcgtctcattcacgttccccccttctaggcattctagaatcccggagcaatagctgcattgggagatggcggacggtaaaaaccgtcaatagccggaagagaccctgcgtcgaggacttttcttagattacgcctgtcaggacgatgggtggctctcacgctgagattcggcctcatccggtctgagcgcctgggacgataagcaaagtccggcttttgttggaaagcgcaagagatcccggaagcctaatggacgccagaacttggatcagccaatcaccgagccggtcaggggctttgaccccccggctttgggatccacttggtactacccgttggacctagcgcaaacctagtttgtcttggcatggggcttggcacggcttggccgagtatctccccgcttggctggcaacttccattgtaaccctgtagtcttggctattccatctgccctatcacaagcaagacacggctgataaccgaggtgacatagctgatatccgagatatcgttgtccaagattgatatcgcctggtctgggacccaatcatacttatgtacggagtacctaggcaggaaagcaacatggcgaaaatgcggggcttgtgttgattaggctcaaggtgaaattgccactactttccccctggagaagtgagacatggtgtgattggccccatgttatggcaacatcaattacccgactcttttacaaactgctttcgcgcattgcctcttggaccgtctcttgggccgtctcttgggccgtcggtgtccgagaaccctatgaacctcatgactatcgagctgactacctgtttaattgttggaaactattggtctttctcgctgggcttacgcgatgcagtcttttgattgccctgccactttctcagcccgcgcatcgtcagatattctagggataatggcatgtctctttcaccaccgtgtaataagttgtaatatccgaaatcgctagagtcttgcaaagatccagtgtgttatccgtcagaacccttgtatttgatgtgaacgggcgatcacccggccgatctcaccacgtacatggtgtctagtcgtacggtggagtgttactcgcactcgaactgcacgggtaactccttgatcattggggcgttcatctggctccttgctcacttccactttcgtaccctcaaactcatgaaccccatgtttggcagatatgttcaccgcttcgtgggtggcgggcgacattccaaccttgcccgcttactctgcattgaccactactacctcggtgttcgtgcgtgttccactggcagttgattggacgataatatcactccggcggtacaaatgtctgcgtctgctgaactgcacgtagccaagttatcttggcctgccttgttttgagcccatatccatccccgtcgcgtgaccatatacctgcgtccttgcattgtcagattgtattcaaatgtctgctttggggaggctaaaatcgaaggcagcatggataacccggtaaagcatcttagaattttctttgaactgctaacccctgtttatcgcattggactaactgaacatgggggcattgtgtaaacaaaggtcggctctagttgcgatatacctcggtttaccgagatctatatcatcattttcatttttttcattttttttttttttttatatataatatatctcaatatctccccctgcgcctattttggatccttcatcgaatctctcgagctgacaacgatctagtcgaccaaaacccctgtcgatgctaaactcgaggacggccattgcccgccatgtctgtgaaacaaccgagaaagcccttccccccaacaatcgtatcacctcccaggaagacttcctccccatcttcggaactgtactcctgtctcgctgagcaatcatcccaggggtaccatagccgctggccaactgagaaatcctccatcgcctcttctcttacatactttcttgtgagatcccgacaaagtgccctcagtcagcacaatttctcggtactacctcgaatcacatcaactcatttacgagggagaaatatcggaaggaagcccgatcgctctgatcacgagatcccagccccgctccgataccagttcgcctcgacgaccccgtccaaatatcactcgaagcaccacgatcatcaagatgctaactagtcccatccctgatcgcaaagatgcctcttgaataggggcttctacaccgaacaatgagccttgtatcactctaactaagacctccacgatcgcacctttcttaggtccacgctgatgactttggtatataacttcttagacaattagatcaagttggtctcatcatcccaccccaatcgcaccggcattccttccgataaatcggcttcggaagggaactacatcttatctgaccaaaaccaaggtcctgattctcttcgagatgggaccgacaaccctgataaaggccaagatccttcccttgatcccaacccaactccgaaaggcaatcacacacttccttcccagaaagaacctagattagattactagactagggctgatcccaccccgatcgcgccgacggacactgcatcttttttaaacagtcacaccgatggaccgtagcctcttagaaatctagaagattctaccctcattccagtctagatccctaaatctctgacgagtttccactgggataatccccctcttatccatcagttagaggcggtatcatcccgtccagcgacgtaacatgtcctcggttgtgtttgcatacggaactaactctgataagtgctatgtattgccctagtccgtctgatatctacttgttctggcatcagcatataggtgctcgaaaagaaactgataattccccacttgcaaagccatcgacacaatggaattgttcgatcatagcaacccgacgagaatgccacctctgtcttaccttgagtcgaccatgagcggtatgttcgtgtatatatatctctaatagggacgtatcgatgaatgtgatgttcgattttactggaagagaatgactttccgtggtccgacgaacagttcataatgcaagctatgaagaactccactggtgggttgaatagtaaacaaagcgaggcgaaagttccttcgactcgaaaaataatctcaaatgtcatgatgcaattcagcctttcagccactctttagttcgtcacctgtcggttaacccccttctatttggaccgatcagagacaccatcttaggtctcgaatacacgggtaatgaattacgctttcaaatttatcaacggggtaaatcactacctcgataatcccgatatccaattcatctactttgactccgagaatgcggaaaaggtcaagcatctcagcgggtgcctttcgccgcactttcgattgtatcactcagtcaaaaaaatcacgagtggttttcctgctgaatgtgaaggcgtaattaatctgccttagtcgcgagaatcctttcagacgttgtggcaagagaaggaggggctggtaattgaatctagattccatgagaaccatcctttcaatgtattgcagggcaattcgattgtcattgccgacgaagatgggcatactttgccaattcttcttttccattggcaggatggcgaaagtcttcatctgaaaaaacaacggcttgcccaacaagctgaatcttttatatatccttgacacgaacttccagtcttgaagatggcgaatttggctttggttccatcgccatgaccagttattcacagtgggacgcatgaaatggtgctcgacagtccactcttcgtgcagcagtttccgcaaagataatggcctgtttaacatagatattgcacgcttcccctgagacttcatgcgtgttctcacgcaatactgtaaacagaaaggaatgtcgttgtttgaaaagaaaaaaactcataatcattcggagaacttcgtacgggagacgatccattttggcagtgagtgatagaactaatagaatcgggatacacataggccgcgcctatataagttcaataagcacatgtaatatgcacgtaatgacacctgagtttccgaaaaagccagtcattgactgcaagcgctcatcatgaatagttcacactgacctgaataatgcagtatattcgatatttgttggtcaacgtgaataaactcaatcttgcccaagaaacgagccgtcatgaccactcaggcacatcctcgtggctatgacgggattggggatgagcaacctatatgtatgatggatttctctcgatacatcgcaggtatgggggtttcctagggccacgttctcttttcatgtctctcatatcacgcagacctgctgatacagagtgtgatacagaagccatcaaaatgtcaaaaccaacctattgagttcatttggtgagagagctcttccaacctcatgtgccattggcctatttgcctagaaaagcagggtattcgaaaaagtacctttcaactcacacagtgtcatggtggaaaatggatatgccccgtaggcccggtcggaacattatttgtccgacgtgcattcctctcggcggccacctacaaatcttctggacagattgtactatccaagcactgctacacatggtatacatgagaaagattatttgcgcccattatcatcgcatggctagtgcactggccgatctgccgcttgaatttgcggctatgtttcttccactgcacctcagttgccagcagcacagagtgccgaaggtactatctttgctctatatcagaacaatttgacgactaccgatcgtatcctcgactatctacagaacctatttttcttcgacgcctcgcggcaacagcttacagatttcgtcgccacctaccaagataacgaagaagacggctcacccttccgcacaggattcgcttacaactggtacatataaacgactggccgccatcctgggcgatctttctttcaccctcatgcgccaggcgttcataaactacgcccccaaagcgaaacaagtcgtggtcatatctatcatcgtattatcatggtcttcccttcctagggacttttcacggatccgatattgtgcagatgttctatggggtcctaccaaactacggatccaaatctctacactcatactgcttgtcgtttgtctatgagcaggacctcaatgcaaaggctggagattatatgcattggccacaatggggtaataaccagtcgctgatgaattcttccatcgaccgtggtgccctcatgccggatgactttcatcaggatagttatgaacagatcatggcgatcctgccgcgttctatatgggaatacaagggagcacaagggaatatattaggagcttcacgaattatgtttatattatcctaggatctgatctgggatttggtctgcacggttgtgctcataaaatttaggcaagaattaatgacattcgcaaaattcagggatggatccatcgatctctaagcaaaatctgtgttcagaactaacgcccaattcagttccagctcgccgtcacagtggctgtacttccagaacacccattcggcaccgtataagaccgattatggtcgctttccaacgttgtagctgcagatccggctgtcttgaggaatttgtgctggatggtcattccgacgaggcgtgtgatacttgtacatctccatcagctgggtgccagatgaatacccgctccaacttgttgacaatgtgtaggaggatccggataacccggccttggaaagcactgtagtgaccggcgagctgcccgccttatttgtttgtggccatgaacaaagcgagacatgtgcgttggcgaagctcttaggtgaatcaacggagttagcagccagacccgatttataccttcgacttgtattaccgttatctcatctaggtcagcacaagacgagcttttgttcgcggtaatatacaccgatgtaagctttgcctagttcaaacccaatcggttaattagagcagacgaaaaagttccaaattcctttcagagcaccatggaagccaagaaacgtcgcgtccagctcacatgtaagccacctttcaccaaagtgctagttccgaggcagatctggcgggctggcgacggggataatttaacctggtgattggtggatatcagccaccaccccggattatgccgtaaaaataacaaggggcggagattcaacggaatcaaatattggtgaagttgattctaacgtggttgatctaagcgattgggatgaagatcaatggtcggacagtaagacctccatctgtctcggaagatattcgacccacctgaagagagcaatgatgggccggacatttgaagagttaacaatgaagccctcgagtagcgctgggattatattccaagctgacggtggtgtagcggggaattattggacctctgattgacggcatttctctcgccccggagctcattgtctctgaaacaatgtgctgtcatgcaagtcccacacaagtgcattgatctgccttggaattccaagtgcgttgaatccacttgcctgtccccgctataaaagcaggtgtcgcccccacaatcatcccaaaccaacttaccttctgacaccatgatggcttctcacttttgggctgctctttgggtgctcacacttggctacgctgttgtagttgcaccacagatattggtccctcgtgcgactggcagtctggacgcctggttggtgtctgagacagcagtggcaaaacagggtatcctcgataacattggatctgctggtgcctatgctgcgactgcaaagcctggcattgtagtcgccagcccgagtacctctgaccctgactgtaagtattggatagctatttgtggcagcggaaaactaacttaactggcctacagactactatacttggactcgtgactcggctctggtgttcaaaactctggtcgatatgttcaagaacggtgacagcggcttgttaaatattattgaagaatacatcgatgcacaggcctatatccagacggtatccaatccatctggagatctttctggtggcagtggattgggggagcctaagttcaacgtcgacgagacagccttcactgactcttggggtcgtcctcagcgtgatggaccggccttgcgagccactgcattggtctcgtttggccaatggctcattgtataaaccccgaatctgttggcttttgcattgctaacccatttaggataatgggtacaccacttacgcgaccaacattgtctggcccgttgtgcgcaacgatctctcctatgttgcccaatactggaatcagactggatttggttattacacctcaaattttagttgcgcacatttctaatgccctatagatctctgggaagaagtttctggctcatcgttctttactgtcgcagctcagcatcgcgccttggtggagggaagcacattcgcaagccaggttggttcctcgtgttcgtactgtgactctcaggctccacaggtcttgtgcttcttacagtctttctggactgggtcttatatcctggccaactttggtggtggccgctctggaaaagatgccaacacgctactcgccaccatccaaactttcgacccagaggccggatgcgatgacaccacattccagccttgctcagctagagcactcgcaaatcacaaagttgtgactgattcattccgggcgatctatcctgtcaactctggtattgctgcgggcaaggctgtttctgttggtcgatacccggaggacacatattacaatggtaacccttggtatctatgcacattggctgcggctgagcagttgtacgatgcgatatatacgtggaatcgtatcggttctttgacaatcacctctgtctctctcggcttcttccaggatctgtacagctccgctgcgaccggtacctactcctcgtccagtgatacatacacctcgattctgagcgctgtcacggcatatgcggatggatatctcagtaatgtggtatgttgcatgctatcgactattgaccacctcaactgacagatatcctaggaacaatacgctgcatcgaatggctccttgtttgagcaattctccaagtcagatggctcacaactctcggctcgtgacctgacttggtcctacgcagccctgcttactgccaatgaccgtcggaatgcgatagttcctgcaccatggggtgagacatctgccagcagtatacctggccaatgccagtacacttcggatgttgggactttcagcagtgcaacaaacaccgcctggccgaccacgttgactagtagatcaggcagcggaactactaccactacgtctgcgaagacaacctcgactacagcaccatgcactactccaacagccgttgcagtgacattcaacgtgattgccactactgtatatggccagaacatcaagcttgctggatctatctccgagcttggctcctggtccccaagcagtgctattgcgctgagctcttctttgtacactacgagcaaccctttgtggtttgtgactgtgacacttccggcgggcactgggtttacctacaagtatatccaggtggcgagtgatggcactattacatgggagagtgacccgaacctgtcatacaccgttcccaccacgtgtggtaccacagctgtcacgattagtgatacctggaggtgataactgaagttttggatacctcaattgaagattgtgcatgctttattcttctatcgtcgtagaatagcaccatgataatgattgtttatctgagtattagctgtccgaacacaaccaccgcctgtccattgtgtaggcgctgccgtttgaactattacctgatcgggctaaccttaccgataggctggtacggtgatgcggccgtcacatcataattatatcaaagtagtgaataaatcgccgcaggatgtaatgacggagggatgatgtgtgaggactccatataagatcaaattgagagccgatgaaacctgaaatcaagttctttattgtcacttcgttaaaaacgtcttagtcaaaccaacatgtcgacaacagaggaaagagtgaacgagatgcgtgggtacaaggcgtaagtactcacttttgtgatactcatgagcatatctaattagcaagtttatctttcatagcacgctgagcaacccgagagtttcagaacgggcaaagcagcatgcacacgacaggcttaatgagcttggcggtgataagcctcgcgaggaactatttcaggcaagaggcgatcggaagaaagacccaacgagggtcgcagctgggtataaggcgtgagtataaataagtcttgggatgttcttcgcatatgctaattggcctatatagcgcgcagcacaatcctaacgtgactgaggccgggaagaagaaagctaccgaggagctacacgaaactgttccggaggagtagagaccttttggttggttttacctgatatgtgaaactaagtgtgaaagtatatgttggcgtcacaatattatatacgttccaatgttatagggcagtgatctgcacagaagagacgatgcgttactgtaggagactaacacactttgtagcaggcttatattgcatacagtagtgaagttccgatgaacaaaatctaaatttgatggcgcgtaataaacagcccgccgaatgacgccaaaagcgaaaagccaagggaaacaactatagcacgtcagtggaagataccaaacgcgttagaatccatcaactcacgatatgtatgcttaagtcccaaaacatagcaagccaccaccgtctcccgcagatggccacttaggtgcgcgatataatttgtatcagccatcgcacgttgaataacctagagcaattaacatcagaccaaatgagcttcgccaagaaagtgcgtaccttctccgagccaggtccgtggagattaagtctcaactgccgctggaactccatccctagaacagaattggacgtagttacacccgccgtcatggaaaatcccacaataagcatatatcccgccgtcgccatagcaatttcctcaactggcagcatggcagacatggcaataaacgatgaggccgatgcgattcccgtgccaagtccaccgggaagaataaatagtgactcccagaagccgctgtgtccatcccagcggaggtaaaggagcaggtaggaaatggcggcaactagaccgccgatgacgagcagaattttgaattgtcccgtgcgccgaatgaatatgcccgctactaatccgccgagagtatttcctatcactgctggaatgagatgcacgcccgccattgtggtcgatgcgcgctgtgtcacttgaaaatatagtgggacagagaacatcattcccagctgcgcggagatctgaagagcgccgattatgtatgccaatgatacgttcgtacgccggagaatacggagattgaagatcggttcgggggctacgtaggcttccacgagcacaaaggtgatcaggagtaatgcccccccgcctgctaggaggactgtccaccatgagctccacgggaaggacttcccgccctggtcgaggagtgtggtcattgcgataatggatgagcctagcagcgcggttccgaggaaatcgacctgggcgagtttgttcactttggtggagtttgctttctcaccgacgttcagtttaacaaccacgagagctgcagccagagcgaggaacggagcttgtaggatgaacaacctgggatgtggtcagaaaatacatacagctatcggataagtggaaactcaccatctccatccgatggtatcgctcagccaaccacccaacggacctcccagactacgtccaagcgtcatggcaatgttcacatatgctctccaagtagcgacctcgcgctttggaacaatatctgtgatgataatggagctgatggtcatgattccggcaccgcccattccgctgatcgcgcgaccgaaaaccaccacccacattcgggttccgataccgctatacatgatcagatttgcatttcggctgttgggtcaggattttgcctacctcaatatacagccaactgcaaataacagatatgagagcagcaacattggcttgcgaccgtagatgtcactcaattttccatactgggcgataatcagaccttgacatgtctccggtgctggtcacgcccactcaccattggctgtgcagcacaaagacccaacgtatagcccgttgagagccaactagcatcgcgcagacgattgaattcggaggagatccggcctgccgccgccatgacaagtgttgcatcggcattggaaacgaattcgcctattttcgattagctctccggtcttcgtatatcgccaattttcgtaccgagcagaagcactgcgataattgtcccaacacctgccaatgctttgagcttaggctctgtgttagatggcgggagtaatggactttcttcgtcttgggcatggctattggcatcaatgccttggggtcctatgacacccgaaggccccggctcgaccgtgtcgctttcgatatgggccatgttgggaattcaagagcgtcgaactagaaaatagcattgagggggtgtcacctgcggataaatattatgcaatgtttagctaagttgtgctcatcggagtgataaagcacgccatatataaggtccactacgcgtacttcacgaaagaatacatacgatgttttataaaatggatgtagtcttttatctagtcaacgtattccgtacgatcatggctggcgtgttaactcacccccagtcgaccccacaatgagaatcaagtggttagtgccccctcaaggataagaattgtcgagcttccggagaaggttgagaagattcccatacgcatgcggatgaactttgaaactaaattgattggaataaaccaatgctatcctattcttgctagatgactaccagactgcataattcagtccatcttctccgcgacatgcagtcgattacggtaagggacaagtaacgatccgaggaaccgatggtatcccgatcgagctagataccgtacttgctccaatcgagtgtttagaagaagagctgccagtgatatacgttgatgaagaaggagtggacgagatccttcaacgagtgatcgatgatccagaggatatcgaggagctctccgatcaggagggtttctaggagccccgatgtcccaccctcgatcggacggggcagacgttcgaaatatccgagggaccctcgcttgtcctgatacaagagaaaagttgcttctgcaaaatcaccagaacccaaattcctacagaagaccagagacatcgataagacaacacgaagatccatacaagaagggtgcgaaaaatcgaaaaatcatgaaaaggaagacattctcaaagaaacgctcgacctctgagcctccttcgccctcgccttcccattctgcctcggggcatagaacaagaggcccaaacaatcgctcatcacaatgcctatgacgacccaaatctcccatgtctgctgcactattcaagaaccatgacccgtactgtctcattttcaagaaaattatccttgtgcaagcgagaagggagcttgctcttcagccacctaaggtaggtggcatcacatgttgctatgttgatagatagcccaatgccatcctgagcgataacgaaatgactatattttatattgttagcatttctagcctaggccagttgatggtatatgagccccattgatcttgttggtttggatgttggtcgttccctgaaagtagacccatgcttgagggactcgggagaaaatggtcgtcggcggcatcttgactatagtggatccaattgtgttaataacagaaaatacagaggaatgcagggtaataatacctaacaagatagacagagaaagttagatggaagttggatagggaacttctcgaccgatggaagaaaatcaagcatagtgtagaagtgacaaatagtgcacgtcacccatcattccaggttttatcttcaagttaacttgtatgcttttatctctctctctctctcccccccagtagcctcaatataccctggtactatagttactctcacttcaagttcacttcatcaccaaccatcaaccatcaaccatcaaccaccatccaccatccaccacttcgaactccccgtcacagactctcttcggacctactcatccactaatttatggctactccaacatactggccacggagtagccaacaatcggagcaaaaacgaaacggacaagggacaatgaaatttgaagattggctagacaatcagacaagtgaacacccttatttgcctagttgaccattgaatgggttcgaacatgaaaggaatccctacaaccatagtggctgggtttctagcaatattaagagtatagtagtatgtgcactcatagtcgtagttgaaaagtgacgccgtattccataaaatatgacagtgcatattcatttgaacgtctcgacttattaaatttaacattatttcaagtagaggccttggggttcatactatcacacagaactgaataaaaaacatctcagcgacgacgcgagccttgcattttatccagctttgccagaattcccactgcacctacagccccatatccaccctccctccagcaggtctcgatgatatcccgggcccagatttgcttgcccagggcgggaagcatatcccgggatggaaacctggcgacagagtcatcactgccactgtggtgatagagactgacactagtccgtctcccagtggcaatctcgtagaacacgatgcctagctggcagagatccgtccatatggaacaattataatcatccaccgcatctgccaggacggcgtcgatgggcatgatactcgacgcaccaaggtcacaaattgcgacgttcaatgaaccatccagcaggatgttacggctgagaatatcactgtgaatgacgcaagattggtggaggttatgaaggccgatggcaagctggcgaaaccagcgcttctgaagctcgatgctgggtcgtgccctgtgccgcagccactttgacaacgtacctccggacatgtatctcatctctatggtatctccggggaggtcgaggcaatgaacgatcccttccactggggtattgaagtcgggctgaagacgccgccagacttcttgctctcgtcggatcttgcttcggttctgttccacttcctccagcgtattattcttgtacaccactgccattttgattgccacatcctctcgttggacaacaactgctgcatcgccggtcgcaagtattgtatgaggcttgatgtagtgaccctcatcgtcgatgaggtgatacagagccctcatttgggtgatgtgaaagcgatttgggggaattgctgccggtggtcaatgtcttcgatgggagtagaatttctggggaactgtttatttttgtttagatgatctagctagcaaatgattagttagttatgatgtataattctgtcagaaggagaggtcctacctgaagtcaatgtatgtatttggtcttgctttcgacgaatagccaaagtccagggactcgctctcagaggcccgcggagtgaattctctgatttgaagggaaggaccgtggaacctgcacagctgggatttgaccctgtgcgattgcttagactgggatcatggcctcttggggatgcttgaatagagagataaagtcaagaaaccgccaaaggatgtttggttgaaactggaattggtggtgctgatttgatggcgacaaagaatgaaagcgagatgaatgaaagggagatcaatgagagatggtgcctttgacaagatgaagtcgcagtccattcatcgccgtttcataaaaaagccatgttctcctttcctttttcagaaaggattgagggtgaactgcccaggcaaggcatattttgatgcttgaaactggacaagattgcactggaaacacatcgtagttgaacctggaaaatggtcagcgggaatcatcttaatacgtgaaatcgcaaagtattgaacaatattcaaattgaaccctgctcacttgatgtataataacatgtagttgtatcaagacgaggagagctttgctgccagtatatgtattcatagaggataaagaaaggataaagaaaggtagagcccctcaggtagagagtcaaagcaaacaggcaagcgatggatcgaggaccttggcagcaaaaagacagatgtataaattattactgctttccacttccttcatgatcacaatatgcatatatacagcgttggttgctgttctcatctattttaatctaactgcttctataaattgcctcaaaacgcccatcacttaaactgaacttggcgcacatattcatcacttattcataattgatcgattcactgctcgtgcgtgagaacatagcggtatcgagcatcaccattctccatatcgacgatggcctggttcgcatccgtcattgggcgctcctggatccaaggcttgacgcccttggcaacagccaactctagcatctcccggatctcactaggactgccgataaacgagccaccaagcttgaggcccttgctgatgagcagggatgccgggatctcaagagcgccatcctcggggactccgagctgaataaaggtgccgtggagacggagaagtccacagtactggacaataggcatcttggaagaggaagcagtggagatgatcaagtcgagagagctagcgttgcgggtatcccaatccttatcctcagcggtagcgatgaagtcatccgcaccgagctcgatcgcatcggccttcttatcggatttgcgggagatagcgacgacgcgatcagcaccgagtgccttggctaacataatagcaaagtgaccgagaccaccaataccaatgacaccaacggactttccggggccgcatccatttcgcttcagaggcgagtaggtagtaataccaccgcagagcataggtgccgcatcggcggaggagatgccatccgggatcttgataacgaagtgcgaaggagagcggttgtatgtggaatagccgccgtacgatgtcccaccgttggcataggtaccgttgtaagtcatgaccatattatcgcagtgttgttcgaggccattcgcacaaggcccacacttcccgtccttgttctcgcatgagccgctctgcgcgccaacaccgacacggtcaccgatcttgagatctccctcggcatgtgatccgacgcggacaactgttccgacgacttcgtggccgacacagcaagggtagttggtggcaccctgtgaaggccggtgttagcaactgtattcgatgcgaatatgttcaaaatgaatgtgccatacccatccatccgcccatccactgcgcagagtgtgcaaatccgagccacagataccacagtgagtgaccttgatatcgatatcattctcctcccatggcttcggctcgaattcctgccaaaccatctttccttcggcggcttcagggccaaggcctacccagccttcgaacttgtaatcggtggaagacataataaaaatgtctatttgggttcaacggtttctgaattcaatggatgagatcgacaaaccattcctacagggtcctccactatttaaaccacctacacggagagatcagggtccgtctcggagcgttattatgtggcgacgtggtcagcaagtgaagaaaaggtccactcgacccgtcgagtggattgttagtggattttcatgcgtgggttgtcaccacggtcttgaattatttgcgctatatccggcgaagagatttcatttgaacgcaaatatgttgtaaatccccggcagcgggagagggaaggtagagtgaggcataccgtagacaatatcacatcaaacctacacccgaggacgttttcccacccgtatatcctccatgtttaccttccctgaggagttgctgctttacttccaagtatgcatgacgtcagacataaacccactaagcccctggcttacgccgacttatacccgacaagcttatcttgtactggtcgggtccattaggtgcctagtttcagaaaagaatgaaaaatgcttttgattcgacatgattctgttttagtggagaatcttcgcaggttttcatagccaattctatcaagctttcgcatccactccatccgaaggaaccgctttttgccggcggaaataatattggacacaaaggacaagagcaatgacccatgaggcaccagcaagggagcaaattgcggtcagaccatgcaagtacttcggcgcgtcggaagtgcggaagatctgcgagccagaaataccagcacagttggcagccattatcaccaacgccatcgcaacacttcgttcctggggtgtccggcagtagaatgacagccaaccgacattcaaaatactaatgtctggtcagcttgggttatagacacgaggggtatggaactcactgcatgctgcagtaggaaatattagcgatagcaataacgccgtaccggtgccatagcgaagcgtgggtattacttgtacgaagacaagcataggaaattacattccaagtgatagctaggagcacaaagggtccacggtgtctcgttttgtctctgtcggcagttagaatccatctcgtggacataatggtcatattaagcactcacgcagcaagagacagagcaattagccagatcatgctgcagtagacaggaaccgaagctaaagcgttcgccttaacggcaccgaaacccagggctttgatcatgctgggtgtgtattgtgtcagaccagagaagccggacatggacaccaaagtcaggagaacgtgctgcatgattcgtggctgtttgactgtctgccagatatctgcgcccgaaatctggatatggcccttggctttgaggggatcatttagtagaacgcggttacgaatgatgtgcgactcgcgctcagtgaaataactccagcggccgaaggtgatcaagggacggccgtctccggctgatggaggtacgaggagggtgaagacaattgcgatgaagagggtcattaagccctggactggatgattggtcagaagagctcgggctgtataagatcgatctacacttacccaggaagatccatctccacccctccatgccatgggtaccactcagctgaagcagaccggcggatatcaagctcgctgtagccgatgcgaacatctgcccgtagaagaagagactggtgcgaacgctcgtctcctccttcttataccaggtagagaggtagtatagggcacctgtgggttattagccgattatccagtgcgaagataacgattgccataccaggaataaaaccaccctcacagaatcccaacagaatcctggtaaccaggtacgcaggatatgattgaacaaaggcctggaacgtggcaaccaacccccaagcgaacaattgacccgacaaccagacgcgaggtccaattcgctgcataatgatattcgatgggatctcggagagaacgatgccagcggagagcagttgggatccgacattgatttgattcgttgtgatattgaggtcttttgtgatagtcgatgtcaaaacggcgcttatatttccgcgatccatttgcaaggcgaagaaagcagctgcaagaatgggaatgatgatgaagtcgattctgaaagacacttattagtgaaatgttcatagttggtatagggacaagaactatatgtacttccgtcgaacggccggttcttctccatcccaatcttttacaataccctggtcaagctcacttggagatgagtcgatgacctgctcccctattttgttcttctcgtcgaagatgccttgatctgccatcttgcaatttgaaggagcttaaacccccaaaaatgaacaaaactggaaatatgtgtggacgttcaattcctatggagggctttacaggaacactgttcttataggaaaaggagaagcacaagataaaggattgcgtaagtcaatttagttaaaatgtgctaaacagcaccaactccgtcgagtgcgttttgacgcgacgacttcttgatgtcgcgagatggggagatatggcgcaatcacggatttgggatttgccaaggatctggggatctgggggttattggcctctagatagtgatgtggacattgaataacaggaatacttgaatataattgattggcatcgttatctacaatgtaaaattagcaaattaactacttctttacacccacacatcccaagacaccccgtgtcgactagtcaacggcacctgtggcccctcagcttcaacaatgtatcccgcatcacaccagtcaaatgagacatggggctgtgcgctatagaagccatcatactcctcatttagagcatcctggagagtactaaccgggtctaccggttgaaggacatcccacggatggatgcaagtcacaccctggcatgacttgaggaccatcaatagagcgtcgagtcgattgatagcctgggtcaagttgcgaccgagaatgcgcggttcattgagatcctcctgggaggaagtcgggtacagattattcaactggtatggatcggtctgcaaaagggttagtcgttgtgataaagaaccaaggtactatctactcaccgacatatcatacagttcatgttcattgttgcaccagactgagtaatacagactgtatccgtctccatgtaagcggacggatttgtaggtgttatttgggatcagggttgagcctccgggacctgccttggaattagtacttatcccacaatggccatgaaaacgttggactgaccaatgccgctataaataccctcaacaacagcagaaccccaatactccactgtaacatgttcatggcgctcaccctcaaactcgggcgtcatgggaatagcggtaccatcgaaatcatccctcggcggtatacccgcaagatggaacaaagtcggcgccaagtccacatgcgtagtgacagcatcctgcacatatcctttagccacgccaggtccacggatgaacaagggaacgcggatatcctcctcaaacccgcaagtcttcccgggcggcagtctgtgctggccaatatggaacccattatcggaggtatagataatataagtattatctagctgaccactctgctccagccgggtgacaagcccatcaactaattcatcaacaccctgcagggcgcgcagacgtgaacgataaaagtgatcgttgtagtcgacgaccgattggttctgcaagggtaggtcgtgaacccagctgactccacttggctacgcaagcaaatcaaatccgtcagaatttgcgaacacaaacacgttaatttgaatcagggccgcgcttacctggtccggattgaaattcgccgtccggggcactgtgacaccctggaacaaatgctgatgtcgttcgagggggacgggcgcggacatgtaaaagtttcccgacgtgatatcgccaggatcgacattcgaatgtggcgcgacaggcgacactgctaggaagaagggcctctccccggccagtgcatcatcgaggaaacccagtgcttttcccgtgatcacatcgatggtatgttcaccctcgtggctgaccggtggttcatggtttcgctggtaagtcgaattgagataagaataggtgtaaggatcgagaaggaaatccgatccattgaatccattgatgtgtgggctgtcgtagttatacacggtatgtgcgttgaacattttcccggtgtaatacgtatcataacccgccccttggagccacagcgggaggaaatcatcgttgaagccacgctcaacgaatttgggatatccgccgtatggtggatggacatcggtcacatttgtattgtgtgcctggcgaccggtccatagactcacgcgcgacgggcagcatagggctgttgtaacaaaatggttgcggaaaaaggtgccctggtcgcggatgtgtttggagattaggggggtataggagattgagtcgagttgcaagtcttggtcgtcagtgatgacgaagaggatatttggcttgcgcaattgtccttcgttgggtttcagtaccgattggaggactgattgcaggttggattggaaattgagggctgcaacgccttcgacggcgacgaggccggcgatggcagtgattaatttcattgtgtttgagaaagatcgcggagtagtacaagttgtatttgtatgcaatttataaagaagctatccaatgtggagaaatgtggagataacgatgatgccataaatggccccaatggcgggagataaagtgaagttattcagagtcttcactttgtacaacatcggacagtttattttcacttctatacaatgcaggggctccttgatgcttttcccacctccgattgattttagccaagccggacaaggtgggaagtatctaaacactcgttcatactactccaagtgccatcaagacagcatttttgactgactatgtgtatgtaatataattgggaatagatacagtagcctgatcaaccatcgagaaaacagtgtagttattcagtcgtgaatggacagagggagaggctctatcccgtgtgatgccttgttaacaaggcatctagccaatttacatgtggctaatggtggctaaagtcacgtgtgtattagctggccaagaagcgccttacccgaagtagtttagaccgcgtaggataagcatagttaccaagaatatcagaggctggcttccaagtaggatcatcatgcttagttcaacctcttttcgcttagttgcatttcgggaatcattcaaatcaatcaaacccaatacattgtgcaatctacagttcccttccctcggatcaattccatgaatatgtgcaataaactcttgctagctacgggggaaattgttgagctatgggccctgggtattgcgagatagaatttcaatatgtctacaattagtttgcttgtgccttgagcacctcgttctttgtgttcattttctctaggtgtagtacccatgattaccgccattcacatcagtttgaagtagtatcctcgttcatattacattagtagtagtgcattctgtatttagtacagacccgacacactaatataaatctagatgatattttatgatacgaaagggcccgtgttagattggaggataggtcaacttgaagatagaactttaaataacatataacttcagaggctaagagttatctaagatttatgtgaaagttatgtgagtgtcaatggtgtaagaagtacaaggttgtagttcaggtacactctcctgtatgattgcttttctttcatcagtatataagtcctctcctacatatccgacgagatattattcctctccatttctccgctgtatctgttagtcgatcatccccatatctaggtccagccctaaatatctgacagggcaagaaactaacaatatcagattcagagaaggttgggcgggtggccaactctaatatatcgagtaaggtgaccagaatatctgagtatggcatgttggatcaacggttagaaatccggaccttaggctcgaaaaactggagacaagagaggtggttagtcttgtggttcacttgtcactatgacgtgctagtagttgtgaggtgccaggtcgatcttggagagggaggagtgcattcaactaaatgactgagatgaagaaagatgaagcaagttgcaaagcagagaacataattatctttctacgcatgttcacgaccgcagtgaatattgtgtcgtcgaattgtattgttcgctagattgctaagcgagaaggttcgaagtttgcaacgtttgcaaagggtaagctatatcaaaaggctgtctggggccgtgataataatgccctgtactacgaagggtcgctttcactgtaaaaacaaaatgtcaatattcatagtattcaaatgacaagcttcacttttaatatatacgcaacgctatgccgaatgtacatccaaatcaaagagaaaagctactttgacagccaaagcggcttcataatagaccgcaaataaaccagtaaaaagaccagcaagtagttcgtaacggtaaaagcaagaaagataccgaaatacggccagatcttggaagaatccagaccaattccagacaaatactgccaacgcagattagcatctattccggataagacaaaacatattccaggaaacaaactcacatcatcaccaaagctatattcacaatatccacattcgcccattccatccgggttggagagatacccaacacctttcgcatcaagccatgggcccgcgtactcactgcaagtagtgttgggtggactctcgaagatagtcaattcagtctgagagcaaacgacagcagtaccacggagaacggaggtgagcaccccaccaatccagtacgtgaacggtgtgatgtaatacattgtatatttccaaaaggcaggcatctgagattgcggacggaggataccgttgaagagctcacacatgataatgaagaagggcatgagggtagcggcgatcattgagtcggcgctatcgattggcaggatgtgttagttgattaagtcactgcggacaagaaacggtgcttggttatattaaactcacctcagagcggcaatccactgaccccacgaggtcgcaaataggaagaaaaggaagaacatcaggaaacagtagccggctgcgaagccgagtggtaatcccaccataaaatagtataggacgaagaagacgacggcacccagaacggaataggggatctcggagatgatctgcgctgtgcagaatgctacccagccgtatacaccactcgggccttctcttgctaaccagatatcgcggttcatgatgaagcgcatagatatagcgttgataaactcgggaaccagcatcaggacaaggaagcaagagaacgcctttgactggaggtccgtcgtactattgccgatctggaggtaggtgaggccgttgataagagcgtggaggaaggaagagtaaagacgcgagtatgggtactcggcggtgcgccaaaactggcgacaggtccgttgagtgaggagtatgatctgctggctgagagggggtagggttgggggcagggaagggggacgggtattcttgtcggagcgaattgaagcgatctcgttcttgacctcggcgaattcttctgagttgcgccagatggctgcccaattcgtagggtttcccgaggctttcatgccgccgacgactacttcgatgaggaaatcggctgcgttggtgactttttccggaatgttgccgtgtcttgcgaaatactcgaagattgcgtggccagattcaccgactgggccaaagtagtatgtgcttccgccagggctcagggctaagacgcggtcaaactggtcttgttaatattgattcgtaagaagggtgtttaatgcttacctcttcgaattgctgctgattagcctgatggatagtgcagaggaccgccagtccctggttggcgagacgtcgtagcagagcgacgatactagttgcgccctggctgtcgagtccacttgtcggttcatctaagaaaagaagcaagtttggccgagcgcacagctccactccaatagtgacccgctttttcttttcaatgtccaaagacccgatcactgcatcttgtaattcaaccaagtccaatgtgtgaatcaccgtttccacgtatgccagcttttccgccgttggaacttcgtggctttgtcgtagcagggcagagaactcgaaagcttccttgatcgtgctgctttcgtcgtggatgtccatttgctggcaatatccgatctgtcggttgaaggactggtcaattgaccggttgtccacgaatagagacccggacaagatgccgggactctctctttgagtgagtgcagtcaacactaaaggttgtcagaaatcaagcgatggattcatttcattgtgatcttacatgtagacttgcctgctcccgaggcaccaacgagagcagtcaaagaccctggtttgcagtatccacaaaccccatccaaaatcttcctggtctccttgccaatctgcacattcagctccaagtcagaccaggagaaagtagactcggtagctgtaagagtctggtcatgctttgtttcatgaccaacaggtggcgctgcagaatcaatcgagacaggcgattcctcttcatcagacttaactttcttctcccgcttggacagcttccgcgagcccttgtattggatagggccagcactatccagctcccactcaagcacctcactcagccaacaggtcatcccaataaaggcgactgtgaaaagacagagaatcccgaaattacgccagacgttgctgtagtagaatccatatctcgcagccaagtagtcatcgccattcacgacagtgctgccaatttgactaccagcataggcacaggtctgatatgcgaggtcggtatattccgaaccggatgggataatggaggctgccgcgcaggggaagttaacattgtggaattcggcggccatgactgcttcataggtatacagagcaggagttgtatatgcaatccatccaacccaaggaacatcttgaatcattttgtcgacggagagaacgtagccgccaaacacgatgcaaaacataacagaaaccccacagtagcgaagagcaacttcaaagttctgcgatagagcggcaaagacacggaattgcgccgtgaggcaaagcgtactcgtgtaaatgaagaggccgtcgatgaagaagggaccggcctggaagagtcagcgtctatactgtgccaagattccgagattactcacatcagaccgtagaccggacaggaagtacatgacaatcaaatacaaaaaagtcaaaagcacagttatcaccatatctgagagcactcgggccagacatacagcgctgggccgcacgaaggcgaatttcttctgtcggctcaggatatcgcgaccctgcatagcttcttccaactccgacatctgcagccaggcaagcaaaatagaagagtagaagagcacacctccacgtgaatacataccctcggtagtctgaggctgatcgtagaacatagacccaatcaacaacccatagaccacgcaagaaattaatttgatgtatagcgggcccatatgccctttcaactgccacatctgacgcttggcgcaaagaacgacctgtcggaagagcgaaatcgtatatggcgacttagacgagacaaagcgcgacttgtcattttgcacagtcttcttgaatacctccacgctgtcgcactccgaatccgccggatacgcactggaagacctaccggacttctgatcttcgtatctttcgacggccgtctcgatgttagcgaacgcagcactctggcgaaaagcggcttcgagttcaatggggcccttcggcgcacggttttcccatccggcacggaagcgccgtctttcgggcagggtgatactggtcaggaaatccgaagtagtctgcatatcagcgcactcatagcccagatcttcgaagtaacgcttcgcctcgtttgcaggcccttggtacagcatgcggccttcatcaatgagcagcaccttatccaccagctcgtagatggcatccgaggcctggtataaagtaagcaaggttgctttgccacatgtatcggtcataatacgcagactgcgtgcataatcgagtgcagaggatgcgtccaatcctctcgtggaattatcccaacatgctactgatgaatcggtagcgagagattcaatgatagagatacgcttgcgttctcctccagacactccgcggatatactcattccccaccaacgtgttcatggtatgtgacatgccaaaaacccgcccatagatctccaggtaccggggaatcctctcccggtagcgtttgggagtcttgctctgcagtgcaaactcgagcgtttgacgcacggtcagggtggggaaatgcacatcgtcctcggggatgtaggccacggcgccacggtagtgcttcctaacttcatccgagctgagaccggagtaatcgattgagcccgtgacacccagaaaggaagagtggtggccagcgatagttcgcagaaaggtcgaacagccggcaccaggacggcccagaacgctatatatttcaattagaccaagttcggtaaggatgagatggcgtttgatttcctgcttacagcatgatctctccgctctgcacgactccggaaaaatcgcgtatcagcggacgcccatgctcgggcatcttcttcacgatccatggctggatcgtccattcatagacatcctgtagggtgagggtccgccacagggctgtggcgaaggtctttacatctgcgtgggagtctccgtcgccccatgttgagagggattgaaaacagacgccgaggttggcaggtttcttgccctggacttgttcctcgaggaacttgtcgaaggaggagtgcggttccgggtacttgggatccgggtggctttgagcggttaatgtgtgatgaatatcggcgagggcatcttcgtcctcgtatgagacctgcactctcggcggttcattgttgtgtttctccttggcaaaggaagagctatgcttcaagtggggatgaagaggagcgggcatattgatccttcgatggtcgttcggaaaatccagacctcattgtactatacatgaagaaattgcacaatcttataaagaataagaccaagaataagaatttaattcaatcaagaaaaaaaggtacgaccacatgtcccgaaaaagaagccaaggctcatgatgatgaacctggatacgaccagccaatccggtggtcgatgagaaagtcaagatgttgctgatggggtccaggcgttatctgaccatctcggtatacagccaatgacagtggcaaggtgggtgcaacgaaaggcggttcgttcttttcaccaattctggcgaaggccttgaatataatacaagcggagtccgcggccaccgcgcgattgttttgcagaaaagggaagccaaggcgagaaggatccaccgaaccattcgagagccaccgaggaacattggaaatgaggattttctattaaccgtatattctggcatattatgtagacgagcctagttaggtctatgtatactctctgatcgagatatagtatcttccagtctcgagtaatttcacaggggcattgtatcatgtcaacccccacactttcctgcagaatgacatttacaccggagaatttctcacgtggcgggcttactaatatatgcacttctgcctcaggtgtcgaggtccttatctaattcccaatccggtctagcgccaccgagctccaagttccccgtctccaaactccatattctccccctcactaccccaaaatgcaaactctctacaacgctctaatccgcacccatcacataacctcccgcaaaaaagtagccgcgctcaaacgagccgcagacacacaccaatgcgccgtactcctgcgctccggcgggtgtccggggatcatgtacgtggagggcggaaaggagccggtggagagctgggtggatgttgtgcgccggttacgatataaggattttcaattggttacgcgacccggcgttgtggaggaggaggatggatatgggactgggaatggaaacaatgagaagagaaatgagagagagttggatctcccgttgggactggatgaggtagagagtgtcaaggagtttggaggcattatggcgaggaggggggtatggaattggtggaggagaggcatggggtatgcttaatgtcttcatgtggatttgcattcatgtactgctttctgagatatccagttgaatttttggtttctaatacagtgatcgtcgttgattcatgtcttcccttgaaagaaatatatcccaaacgccataatctacctatactacatatgtatacaattaatcaaggtgcgtttttcactcaaaccggcgccggataactgagcagcttgcagatatcctacgacagttagcaacgagccaatattcccccatgactaaacatacctttcgttgtctccgatacttatcatatatcatcttccagatctctcgatcccgacacccactctcctgcggcgtgccaggattgttatcacacttcggctgctcagccgccaacatgtcctgcgaccacataatccacggcttcggcagcggccaatcggaaaagtgcacaaacttagcctgcgccaggacatgatcagggtcccagacctcatcatcattccccaggaacttgcgatgatccttcgtccggaactcgccgctcaatagcccatactgccgatgtgggaggaccattgctgagtccccatatcgccgattcaacagctccatatcataccgatggtccgtcaggtttatatcgacttgaccgttctgggtgggtgcggtaacgtcggtcaatgcaagatattcgcggagggagggctcaatgacgaccatcagtgacgagagcagtttgtccggaagaagccagtaagcacgtggcatggcgacagtggtaggcgggaggaagaagagctcgtccattgtctggaggaggataacgtcggagtcgagatggatgacacggtcgtattcgtgctcgccgaaggccatgagcttggctgtgctagtatcccacgaagccctggaatcggagtctataaagcgagtgacatgtcagtgggtatcttcaagaagctagaatcggttccaacagcggcagccgaactcactggatccatcctgaactccctcgatcttgatcgggatcagcattacattatacttgagtttcgcctcaagcagcaactggctgacgcggtcaaactcatcctcgacaatgaggtcccactcctctgggtaaaacaagacacgttccgccctactgccgagtctgtgcaaagcctcgaagaccatcaggcaattgcacatgtagacctcattggttgcatactgagtataggcaaagcgcgaccagtcgacttcgtcgtagtggatatgtggtaggggcagcggcggggggcgttcacgccgttgccacagaataaacaggacgatcagggcgactgtggcccatgttcggacgcgtcgtagctggcgcttggctatggagagacagggttcatcggggatatcgaagaagtcatcctccgaggcattggagctccgtcgataggggagggcgtaatttttgggcggcattgttagaggctgaagctattgacagcgcagtggtgatttggatagatgcacgtgatggttatgtaatcgttattgtgaatgcattctgatgctaaattggatttgatatcgaaggctgagaccagcttgcaggcttgagattgaacattcaaagttgcggggagggcccacctcttttcaaagttggagcaaccgtggaagatcgcatgccttccaaggttgtatatactactctgtacaaactattttctattttctccatctgtccaggcatgacatacaaccacttcgtatacattactggtggtgatgagatcctcaatcgttggtagcatggagtaacagttccagtttataaccttctagtcgggtgtttgcctacgatggtactcgaacgaatttctttattctaatcatattaaccagcagcttggagtgacggagaaaaaggtccattggtgataactcgaaaaaaagcgaagtcaccgcgatttccgcaaaaagacaaaaatagtttccctgggaatcgaacccagaacctttccggaacatttgcgaatcgcatttgttaacggaaaatcataaccgctagaccaggaaactgctcgaccacttgggccaattgatgaatgggcaggcgaaaaatggcattatgtctaatctttgaggtataacgtacgaacagtatatttttgtctctaatctcatgtatatcggtcgcattttaatttcatttctcctactgtgcctattctctgtcagtttcagtcactatataacccagcttaattggggactgccatatacaccgagttagttgttcattgagcaacttgtatggtagtccacgctagatatatatagaacgcataaataaagcagctgccacattcaactctccgctctttctcgtttgccactaaggagggacgtagtaggagaaaataattataatccaagtgcttattatataccagagatctatataccgtaaatcaatgaaatcccccaaaatgagattcacccccattaggcaacaacctcgtcccacccgaagagatcgacctcccatcatcaacttgaacaacaatatctgtcttaatagtaacacatccatcatcatgatggtccggcatctccgccttcgaaatctgactgacagagcgctcatgcccatgtccattccagtgatcctcctcatccttaatataagtattggtcatattagtcactgtagccgaatccagccactggtcctgaacattaacgcggcgcttcatctctgtgtctggctcattatgtgcggttgaccgagagcgagaccagtagccgtgataccggccctcgcgtctgtggtcaatgaaggaccggaggaagaggcgggctactggggcacaggaggcgaggaggatgctgtagttctcaatcctgggagtgttggttaataatactgggattgggagatggtagttgtacttactttacccagagaacgaacgtcacgatattataggtgaagtcttgtctgtcaccaagcgatttgagtttctagtgaatgatattagcgctgctgtgtaagtcgagaaaagatattatactcacataggtctttacaatagaagcacagccagagagcaagagtggtccactgagcgtgatggtctgccagatccggcgggatcgaacggtgccattaattttgcggaattgagaccagaatgaggtgtttggattacggtggagggttcgcaggaagaattgccagagttcgactgcagcaagcacggcaaggaagaaatcgatcacggtgttgaatcctgtgcgaattgcaattagctttgagctgagctgctgaagtatataattttccatacctccttgtacaaagcctacagtcgtttggacaaccggtgattggcacttgacggaaccatcttcagggagtggtgtccacatatagtgaaagtattgtactcgatcagtctgctctgagattagaatggaccaagcactaagaaggaggatactaaccgtttgatacgggttcggtccgcactggacaataatctggacgattgtaaccatattgacgacaacctgaacaacggcgcagacgataatagattgtcgaatcttcttgtcgctggctgcaaagcaagtcaaaagaaaccacatcatgcctgcgcgtgacaccattgccgaagtgacagccatcggctgtgaaagaaagtcccatttcatagcataaagacgctcttccccagttaagtagaagaaatgtctcccaaggcccgagttggcactagacagagttaatggctgacctgggaggaatgacactagtcgacctcacctcatttgaataagtaccatatgagtgatatcaaaaccccaagccacgaggaagaataagtcctctgtaccccaaattcgaccaggtgcagtgacctgcggtaaagcccaacgcacccagatcttgatagcatagcggaacaacaatgctacgccgacaatggatgtgaggacctgctcgaggattagtatacatatatccagaggcaatttataagatcaagatcatacccagcaagcctgaaatgtgccggttcctgttaaacatgtcaatccacgatcctctaggtccatttgcttggcatttgccaggtaaacataccgatatcaacatcgccctcactaggtttcggaatatccataatgaagataaaacacaataaccagacctctcggttataggcagggatccaattcaaatactcattggcatatatacgagacgagaacgatgcgcggggtcggtcagatggatcaaatgcgaaagaatataaaccaaatccaatccagcaccaagggatagtagaggagagcttttaagttgcctttaaaggttattagaaatggagatcctgtcaaaagtctcgcgcgaaccggtttacaggtcagaaacttgtctagactcgtttccaacgggtggaagggcgcataaacgtaaaatgatcgagaggaaacaagggatgcagggcaaatcccttgatttacaatgaaaatataatcgggtcaagcgaagcgagttgtatgatatggcagagtattgaaccttgatgtacggggtcagaaacgtccagttttgacttatgacaggagttaagctcgtgtggccaatctgcgtgtcagaaaatatcccatccttttgatcgtggcaatggacacttcgcattgccaggaccatgtggatcaagcacaggcgacattccggagagggatggaaatcatgcaatggccatgtgagatgcagtaagggatgtgacggagaatgagaaaaagaaatacatcaaatacacatccacatgggattgatggattcgatacacccctagatcggatctgcaaagatctgctgagttcgagagataaaaactatatgcacgtaagcgaaactattgattgaagggatgtgatgagtatacatcaagaaatgatatatcatattgacaaagaacgattaacaatgaactagtatcaacaaccaaccattaaccaattgaattaaccagtgaattatatcgctcaaccctgaactaccgatccgccctcctcatctccaccaatgactctccagccctaacataaacctcaaaagtcacctctagcccacacaatcccgccacctgcctccactccaccgaactcctttctcgccccccatacatcgcaatcatactcgcatgaagcgcagtataagtcaaattcttggcgtactcaataatcaaaactcgcgaaccaggtgtcatagcacgcgaaatcttctgcagcaacgctacagcatccaaatcaggcaaattatgcaagatatgttgcagcgcgtaaacacacgcaccccgaacgggctgctcagcctcatttttgtaattccactccataagacgcacaccaggcacatcatcgatatccgcattgaactcctgcacgattagatcatccacaccgagatgcggatatacggcctgaacctcaaggaggagttcgccacgaccgccgccgatgtcgaccatagtagcggagccagcgagggtgccagtggtagtgtcacctgccaaagcaccatctagatcatagcccatcgatttgacgcgctcggggaatgttccgaacttcaggaacttgccgaccatgaaatggttgaaactatccatgcgaccctgagcctccataattgagtacgtgtgctgctttgccagctcagactgacccattagctgataggcgtattgcaaggggccgtctgcttcagcaaaagggtatgcgaattgggtgtctcggagctttttcatcaaaaatgcgccggccattagaccctcggtggtgctggatggggttagtgcgtgcttggctggttatattgatctcattatagaaacaggacatgcatgggggaactgacaagtgcagtgcgccatgctgggcggaaggcatggcgaccatgtggtttgtgatggcatttgctgtgaagcagtcctcggccacgcgttcaactaggccgagtccggccataatgtagagtgtgtccgctgcaggaatgcattagcatatcattgggatactgcttgtacctatacctgtacaagggtgtgcttacaggctaatctggtacctatatccattgtcagcataacatctacaacagccatgataacaagccattatccattcaaactgaaacacgtactcagctcgggttcatctccccctcgggctttgatgcgtgcattgcaggtagccgagacttcgtcggccgtcgcaggtcccccgtgacccacgaggatattgaagagatcaaagtgaatcgcgaccgggacaaatcccaacgatgcaggctgtaactgaattagatagaagaattatctgacagattcatcagactcactactgtgacggttgctgcgagtgcggcgcctgggggtgcaacgggggccgaagatgacaagcccagtaggctggccaagcgggtgaggaaggacattgcgttcgtgaagatttttgagtatgagaatgacgggggaagtatattctgattatactctaaatacatcatctacaagtacaacatacggtgggatccggcagcaattccgatactagggtgagaatacaaacggtgtatatattcaatttaccatgcctggaatactacagattataacacatcaactcctgattcgttattatcatgggattgttgcgctccgtggaagatcattggttcaatgtgaccaagttgggtatgcgcaagggataccacaccaatactccgtaggaacaaagaactaaagcctagaaaataaacccgcgaataggaatgtccaatagcgaattaccctaaggcgaaggatctactagccccgatctagctttatgatacatccactacacgtacggagtacattccggagacttttcaacatatccaaatctgaaaccgattagggttcccctctgatgtctctgaattgataaagactagattctagaatctccctgtgcaaaaaaagccacgcgagaatctccatgtgtattcgaaaaacccgccgtgcataaaacctacggtgtcccgtcacgcagaaaagaaaaagatcttcatttacctccttacctgaccaaagtacgttgtcttggggttgagcttttacactgcacagaatacaggcaccaagaagtgcgagcatacctaccatggagaaaccctcccctgtttactttacgcaggagatggcagctagtgcgtcgtcgtcgcttgagacacatgaactggaggaatgcgatttcgattcggacctcgaggtcaaggatcccttgaacccgagaaattggtcatcggcgcggaagaccatgctctttgtgtcgctgatgacgagctcgttgttggcagatgggtaagtatacccggtcgattgtgaaacccatcgcggctaccggctgagatgtgtatgcataataactttctgactaaatcttgcagggctatggtatggggtggaaccctggtcacggagcaggccatggattggaatattaccatcgctcattcggcgactagtatgaattatggcatcctgctgcaggggtttggcggaatttttgctgttccgctcattgaggcgtatgggcggtgagttgggtctttttcgcccacgttggctgtcacactgacagctgaatgtagtttgccgatctggctgtggcctcaggtgatcactatgtttatggtgctgggtgccaccctctccaatgattggtctaccttcacgaccttccgctctttgcagggtctatttggcacagtgcctcaggtaattgggctcccgatcattcatgatatgtatacctcggctggtaagtattttctgtgggattgtctcgagtaccttatgctgatctgacaacagaatggccgcggatgatcaatatttggtaggagacttgccactcaaatttagggtagcactgacttgagcataggggcaccgccttcctcgtcgggccattccttggtcctgcgatagctggatacattggtgccgggtcagactggcgtatttccttcggggtcctgacagccatctatggcctgtccactgtcatggtgattctcttcggctatgagacatattacaagcctggacgaatgaacaatcagtcacgactcgcgtcttattttggcattggaaataccctgcttcccaaggtatcgacgttgatatattggagccgaacagtcgtggtctatgtgttcaagttcccgttgctgatgactggtgcgtatggtcgacctagcttgctatgacattcactaaccaagcctttgtcgataggaatcgctatcttggtaacattcacttggccgattggtaagtaaccaccatcacaccgttctttcacctgctgactgtgcaggaatcacaaccaccatcgatagcttcctgcacagccctccatatttgtttgacacgatcgaggcatcatcaatgcgattcgccggtgtgattggagctttatgtggtatgcatcttcaaagcacctctctctctctctctctctccggattcttaccatctcacaggctgggcatttggccacttcttcaacggctggatcttcaagcgtcatagctcaaactggcgaaccgagctccgcctccacggtgtctggttcccgataggtagtatggcaagcggtctcctcacctacggactaaccatgcactttggcaagcactggattgggatagccattgggtggatcatggtgaacatcggcatggtagccacggttgtgtaagttccaaatccactctcctgagtactgtcgtatgtctaacatccattgctcagtgccatctcggcctatacattggaaaaatacccggagcaggcgacctgtgtctcggccattctgaatatgtggcgcacctgcggcgggttcgcagtgggatacttccaacctgcatggattcagcgcgatggcctcggactggtctttggcattcaggctgctattctgtgtgtggctgttgctttgactatcactcctgtgttgttgtgggagcggaaaaggcggctgcgagttgatgctgaagctgatccttgaattctaatggtgtaaataactgtatatgtgtgatgataggattgcatttggaatattttgtatttatttttgctcagacaatagaatacgagttgtgcaataaggatagttgatcaagagggacctcgcgtccaaccctgaaacacacgtgactggtgcctaatccatcaggccacaatcccgttgccgacccgaacacgtccgtgccgtgtccgtcgacgccagtttcatgcttaatctattcaacgccatggctggctgctgtactccctactacagattaattgacatcaatctcaaacttgagacatgatttacccctgatcttcagctcctgaatctttcccactaaccaacactcctactctgtacggggtatacacagtcgatcattgcctcgctatgcaaagtcccgcaagcgatgacgcttcccgtggggcagcggtctgaaagacgccaccgtttatttggcttatgtgccgcgtggttgctgatcagtccccaatgaacctgttgcttggcctatcaaagatccctcgttcacctcgttcagaggttcaaccatttctgcctgcctatggattatccactgttgccgaggcagtgtcaaactcgtttgactcagggactcagggacagcgatccctgaccctttttttcccttccgtgctgtgaaacatttgttacaaccttttctgtcttttcccaccttattctcgttagctaaatgacatcggttcctatttaatctttagattgtccttgagcaccaacccgactatgtctagttctccgcgacgatggctcttcgtggtctttccgatccttatattctgcatcatatactacctctttcgattgcctgaatccaacccgacaatcgtgaacaacccagaacaaattcctcaagcgggaggagaaacaattgtggtaggggaggggacaagtcctcctctaatttcccctcctaaagaggagacagtggaggagaaatgtggccatttactacacgcactcgacgatgtcatggtcatcatcaaaaccggtgcgaccgaatcccttgaaaaggtccccatccacctccgcaccacgctgaaatgcgtcccgcactttgccatattctccgactacgaagaaactatcgatggtgtccgcacgtatgacgtcctccgcaacatcagcgaggcaacaatgaataatgaacccgaattcggcatctaccgccgtcttcaagaggtcggacgtgaaggcttgacggacgcagaatggggcgacgacacaaacggcccactaggcaaggtcaataacccaggatggaagctcgataaatggaagttcctcccaatgatcgacaatgcactagaagtcatgcccgatgccaagtggtacgtcttcctcgaagccgacacctacatggtgtggccgaacctgatcggctggctggcacacctcaacccagatcgacattactacctaggaagccccatgcaaatcggcgaaacactcttcggctacggcggggcgggcattgtcctctcacgctggacgatgagcctcctgcacgaataccagatgcgggcaaaggaagatctcgaagcgatgacggcacacgagtgggctggcgactgcgcgctggcgcgagcgctccacgacgtgcacgtcgatctggtttgggcctggccgatgatgatgacgtcacggccgtgggaaatcgaccatttctccgagggatacgggcggcaaccgtggtgttaccctgctatctcataccaccacatggcgcccaaggatatcgagaagatgtgggagtttgaccaggcgttctttgctagtgggaagaacgcgctcatgctgcatgcagacgtttaccagaaacttgtctacgatgggacttgctcggcgcgcgacgattgggacaacctctcagggatcaagattgattttgcagctggcacgattcctacgttggatgcttgtgcagaggtctgtgggcacaacaacgactgcttacagtattcgtttaatcacgccgagggtgtttgtaaacacgcgtctactacctttgcgggtgttgctaccaatggcacgcagtctggttggattacacctcgtgtgaacaaactcctcaaggcattccagtcttcatgcaatgaggtgcaatatgtattggattgatttttctttcgttcctcgggcattttatttttcgttgtctgtacattatcaacttccttttctttccccctcttcctactcgaccatcaattctcacatcagaggacaaggtgatcccatgctttcaaaaaaagtccttggcgaggcgttttgctatggcgctatattggcattgtctgccggtcagatgaagacttatttttggtcgctggaaccgttttccgtttcattctttgttttcattacatacatttactgatcgtttctagtgataccaatttttccatcatatcaaatcaatttaaagactcatttacaggtgcggggttggagatgctgtaatctggatgaaactccgatacaccgtagagtgtccgagttatatgactatcctaagtgataagctatgattcattgaagttggttcactcaacatgtctttgaaatttacggtacttgaagcttacaatgaccatataacagcaccgtccttgataaaagtaaatgatttctcaattcttttctctaaatcttctgagtattttcctgaacttagctaggttatgagattttcagaattattagatccccatggacagtcaagaaatcgtcacggtctttccaccggatgtggtgatttaggcaggcaactgaatgccgtacggtatatcgaggattctaggtaagaaagtacaagatatgtgtataaaacgcagagtgatagtcacctgacatttttgccctatctctctctttgacgtcaaacaaagaagtaaatccaaatgtggcctggcctatttcagcttgagtgaagttcgctgacagattaagagtgtaggttccgataagacctaatcagcactgtagtatgtgttggaatatccaacttcacgccatactgatgatcacgagcaacaggcacaagactcgagttcagtgtctctagttatattgattgaagcatcaatatgtgaattgaagatgcggcagatgcgggtggataattgtgaccagaccaggtggaaggagtcagctgtggttgttttgtttttgtttctcaactttgtgaagccactcaggctgttgtgacaattaccatgaccatgaaaatttttagtggagagatttgcggctgtatgtatggttgtgacccggcaaggattgtggaattgtcgtcaatcaataacttccaaaagaaaaatccaggttgcggatcttggttatcgcagttggtgcagatatgtctgcagttgccagcttctgggggaatgtttgagcatagagagttgaaagtgtggaaagtgaagtgggaggtgggaaaaatgagaagatgggggaaattctgggggatgagtcaagatcgttcatgacagctggcgaaaagctgccgaccgggtctctttgcgaggtcacgcctggttgttggtctgcctcgaagcaacttatagtgagtagcatttaaactaccggccggagtgcttccactgcaagcctgtcgaccagaaccgtttctggctgctgaattgttttgagatgaggtgagggaatgggggataggaaggggagatatgagggttcctagaaacgagtcagtaagttaatctttatacaatgaaggaataaataccataagaaatggttatagggaaacatgtcatggaaggtccatggaggcaggttcataagaagtaggtcttggaggatgtgataaagacgaaggaaggagggatgtgtaggagaaagaaaaaaagaagagacaggaatgggcaaaggggggtatttataccctgtagcttaaggacctagagaaactcgggttggtgacgatatttgactaaaagggaaggacccccagggctgggtcgtgccttccttccatcttcgcgaatcacctgacaccagctctttggaacgcagggaataaaacccataggattatctggagatacacagctatataataactaaagatgaagctattcctggattgcacatagatctatgtaccaatatagacatatagacagggacaggctttgatttgtatcgtatatagttgagccctagtctagatctgaccgatttattcacacagacataccaaggacaccatcataagagcagcttagctcaacgccgctctccggattgtccacacacgaccactgcgtaccggatctcagtaagacatgaccgttctcagcaatcgggcctgagaccctctcaagtcccagtgtaaacagattgaagtcaacggcaccatcggggaagtgtatgtaatattgactgttgttgcatcgggcattttcctttggcgaagatccgtatgacctggcatcaaacggtatcagttagcgtctgccattgtcaatagatcttgatgacaaattagactcaccaaatcaggttgcagtcggttggggtgtcgtcggggtagtttggatcagtcaggctgaaatgcattgtagcagaggagccggcgcttgctctggcccagaagtcactgatctggatagagctgtctcgctcgatgatggggaaggcgatggcgccggcaaccagaagaggggagacaacagtaatcttcataatgaattgatagaaagatgtctgatatactatgagatatgaatattaaatgaaagagatactgtgggagaacgaattatttatatatctctagatggcctgaagtatacaaatctgaccgaaacactgcagcataaatgaaactaaaccaaacctatgcaagtctatgaaagtcgctggttggtcgaattgtagaccgccaccaccaatactcgtgggtaagcaagacaaatgtaacatgatgcagcattaatacgagcaggtagggccaattagctgtagcttacatgcagtgttatccatatataagtaagaaacaatacacatcaaactggtgtacatatcacatagtatgtacattgtatgtagatagtcgtactagtttcggggtgaactgtacaaagtaataatcataagtttccaaggtaccctcaatgcaataatttccgtagttgtaggccgacatatttttcgcagggtcactggacgattctgtctcaagtaagaaagtctcaagaaacttctaccaaaaatggaacctagatcgaaaaagcaaatacattcaactgtttacagtgtcttatgcccatgcctcgctttaaggcctcccaatatcttggcgacgatcattgctgtctacagattttgtcttaaacccgggggattcatgtcagacaataaagacatggcgaatgatagtgctttgttgaccgaaaatctcttcatattagtgattaagcacggtaaccagaaaacgtgcctttatcaaaggccatattgaatccgtaagggtctataaacttccctgggacacatcagaacacccgtgattcaagcaaagccaataaaagccattcttatagcagaagtttcatcgcgaatgaacctggatgagtatatccatctaatatttcctgcacaaagtgaaaagtgccctctcctggacgatccacttacgccaagtccaaataccaaacaaccctgcagatctctcctacttagagtctgtcttggcttcatttaaccgaagctgcggtcgatcggagaattaattggcagtgggaggaaattctatattgtagtgaacgtgtaaattccgatctactggacaggcggcagcacaatttctagcggtttatatgagatatgtgaatatcttagaattcctattgatgaaagcacgttctccaagaccaaggccaataccaagactttgattacctcggaaattcgcgcgattgccgatgcaatgaggtcaacggttacctcgccgatctggaatcccttcactcacaatccttgccacattccggtatgccatgacagaaatactgccttcgcatggacatgactttgaaagcgtagcttcccacctcaagcagggtacctcatggaagttgagactggcgtccgatattgccgtccttccaaggttagctgaaccactctcggactacgggaggcgcatgggacgaaaccttactgtgacgctaaagaacccaaattcctagctgattggacgatgaggatgcggatttttatcagatgatctgataggaggtgattgattggaatttttggacattgcttggccagctaaaccggaaatttccacgatataatatgctcaactgtcttcctccggtggtgccgaccctttgcatacaacttttcatccgccagcgaattgtgaggacccctcgattgtctattctgttacaatggaaaagacaatcatttccgatcaggtcacaccggccagtactagccatgatgctgagagaatagcggaactcagagtccaccagaacatggatgatttacctgacgacaaggcaagtctttctggtcgagactcgaacgagttccagggtggcgtgcaacgagtaagagcgattacatcggcatggtcgaccaagacgctcattctcatgttcattctgtaagtctggatctcaataaacagaaagtaaactaatatcccgccgaaacacaggctctaccttgtgtccttcgtagatgcactactaagctcagtcgaaaccgcactgaacccctacataacatcctcattccacaaacatggcctcttgacagtcgtcagcgtcgtttcaaccatcctgggcggttcatccaagttaacactagccaagatcatcgacatatggggccgcgtggagggattcctaattatgctagttctcgttacgatcggtctaatcatgaaggctacgtgcaagagtatggaaatgtacaccgcagcacacactctatactgggtaggccacataggcctgacctacgttgtggaaatcatgctggcggacatgacctcactcaagaaccggatggtcatgatcggcctgaacggtacacccggtatcgctagtacctttgcaggcccggagattgccacactcttctacaccaacctcgacttccattgggcatttggttcgtttgctatcatgcaggttggggtttgtatacctgtcgctgcggtgatgctgtttatgcaacgtcgggctgaaaagagcggtactcttgagaagactcgttctggacgttcctggtggcagtcaatcgcgcattatctcatcgagtttgatggtacgtatttccatatatgcaggtctttttgaatttgacatgtgactaaagagctgttttacccagttgtcgggatcatcttgatcacagccgcattctctttaatcctgatcccgttcagcatcgcctcctacggccctaaggggtgggcgagcggatacatcatcgcgatggaggtcctcggtgtagcgtgcgtgcccgcattctacatctgggaacgatactgttcaccggtgcaattcctcccgtggaagtatctgaaagaaccaacaatgattggttcgtgcatgctgtacggcgtgatgttcgtctcctgcttgtgagtgccagtctcttccaacgcttagaatcaaaggcacagcctaacgcttgcaaaacagtacctggaacagctacttcggctcatacctacaagtcgtcaacagactcgacatcacaacagccaactacgtgctcaacgctttctctctgacctctttcatcttcagccccatcttcggcctgtaagcacacctcaccaccccacacatacctctgtacaaagtctaacaaactttcttcgcttctcagaataataagctggaccggcgacttcaaatggaccgccatggctggcgtaccaatcttctgcctaggaacagctctgctagtcccgttccgcgcgccagacacacacgtggggctactaacaatgatccaaatcctcgtgggactcggcagctgtctgttcactgtgtgcggacagatagcgataatggcgatggtaacgcaccaagagatcgcagttgtaatggcgatctggggattatttgggtcgattggagcggcggtgggatctgccatcgcaggcgggatgtggaataatatcctcgagaaagagttgtataaccggctgccgcaggagagcaagcacctttcgaagagtatctttgccagtttggtgacgcagatttcgtacgcggatgggacgaaggagcgcgatgctattgttggggcttatgctgatgttcagaggaagatggcgattgttggggtttgttttgtgccgctttgtattctttgtacttggttttggaggaatgtcaatgttaagaagttggaaaaggagcagacggctgggaatgtgtggtagggaagggttcttgggaattggaaatggacagagcttggatggtttgaatagagatagaatagcaaggtacgtggagtatgtacgcaggagtagaaaatatcgacgttatgacttgagcgttgacttgtgatattctggataaaatattttatttgtagtgtggcttcaaccactacacttgtgcagatgcgctggacttcggagtatcctatagcgcgggtgtatgtacatagtttgatggcattcagcctctcgcaaggcggggcgaatgagagtattcttcctgttcgatggtgagagtatgagccgccgagatgaatctcacgggtgatttgatactaaacattggacttgggttgtgatggtggctattatgtggccaaaatatatacccgtggcccatttagattaagacggcaaatttgcctagaagcacggtggcatctatagacagcccaggaggctaggggatggccaagacaatggatgccctttcaagatggggtagaccaaagtaacatggtctctaaaagctagcgagcgaaatcatgccgatatctctcagccggccatagactcctcggggacctcctggaacgtctctgggaagaacccaggtggcggccagatatccgctatagaaggtgggtgcaccagtggttgtgatccgcccaagcgatctgggtcatgacagaaagcctggaacgtgctctcgtccaagaagccgaaatccttcagaccagcctcgcggttcgtggaccattcagtggtatccaggtacgcgaggtctttgaagatagcatcgatgtcgccgacggaagtgacgtttccaggcatcattgggtttgagcttgtcgagtcgggagtttgtggttgtggttgttgctgatgttgcgcgctacctgtgccatacacggaatctgccctgctgcgtggtgtgatcttgtccggtaggactgactgtacttcccttgggtggtgtagtgaaacatccatcatgcctagatccgtgttttccattactgtgtcttttggggtcaaggattgcccgtcgactggcatactgatgccaagaatagaagagttgtaatctccttcgccgttttggggtaggctgcgagctctacctagggattggatggagcctgccatgggtgcacccgaaaatggaaggccgactgcccctgggaaattggatggtccgccaatagcatcctttgggtgctgccacctctccatggcggaaaccaaagatccatatgctggccatgtggaggttaaagctgccgttttgtgtcggaactcgtctgcccacctggcaaaggggaaagtgtccgatgagtcggcagtagtccgaagtcttaacgtttgctcggcaattgtgcgaagacttagctcaaacagcggtggacaaccgcaaatagagaagttctccaagtgttgggtgagcatagagagccctcggtagaggagcttcttggccccctctgtggctggacgctgtgaacggtgcaacccttgctcacccggaatcaattgcagatagagccaaagcagggtggcaacataggttagccctaggtaactctgatggggaagcagggctgaatgccgttctggatatatgctttctggtccaatcagacggcatcccagaggtaggcagtcatcccactgcttaagctccatgaccaactgatgcgcaaaggtggccatattgtatcccgaagacatatggcgagagatcttattgagaacgctcgccaactcaaccaagcggttaaagcagctcaaggccaagagtggtccccggcgcggcgggttcttgctcccctgtggagcacccgtgggtggtaaaacgtccacccaggagttccactcctccaatccatcctcttccaaaaggcccaccgcagtaaggtcgcttggaggcatggctgggctccgtgaaaggcggaaagagagcaatgaatcaaccacaaagcatcctaagaagaccgccttaccttgtctaagctcatcagaccgccggctgtcggacacatatccaacacccatggcaaccgccatgcgcacggcttgtccgctcaacagccaagccgcggtccaatcctcgagacccatgttaaccaaggtcagcagcagcaatgcctggatatggccgggttcataacgctctttctccatggggatgagattccgcgagacggcatagtattccttcgccagggcaactgttccagcggggccggcccgtgaatttgttcgcgattgggtgatagtgtaactcatgatagcccacagggcggcatgatcgccagacccaggtgaagctgtggcaatagagaaaggggcattggcataaaggtaggaagcgcgaagaatattatgcttggtcaccacgggaaaccatgaatgcgtgaccgcaaagtaaatatcgagcagctgcgacgtctgaggcggcaactgcagcgtatggggactgggtccagcgacaccccgaccattcgaatcttcggatagtcgagcccgcttgacacccggcgatacggcaaagggctcaactacacgcggggcacccggaccgagcggggtggaagtgcgagctactcgatacccccattgaccgtcggcgccatcatcttgcggattacgcgatctcttcccagtcgtcggtcccggcgtatcagaattagagagcattttctccagggcgccgaacagccggctcgttttccaagattcgtgtagactttccgaagcactatcatccgaccacacggacatcaatttctcgcgacgaccggcggactcggcagtgtttcctagcatggccagcatggtatcctcgaatccctcaatgttacagatcgacagcgcccacagcttttccaagccacggacgtaaccctcggggagaccgcgtttcttcgcatgggggtcgtaggagcaggactggcccgatacctgacaggcggaacaagtgggacgaatgccgtcacatttatcctagggtcgccgggatgttagactgagcaaatgagatatccgagaaaaggacatggcgggacgcgactcactttcttactgcgacagcgatcgcaagctcgggagaccctcttgcgccgaggggccttatctgatccctcatccatgaagaggggttattagcgcagaggacacgccatgtagagtggaataaagggaacagcgagctctaggtcaattccgagttcactgaatcgcagaataaatttgcaagtaatgccaaggtcggaccgtataagaagcaggccgagactcggaacggggtcgaagatgagtgcaactgcgaatataaagtggaggagcagactctaatcaaaccaccatgtaactatggagtagttagcctccacgacaaaggacacagataggcaggccgagggaggactctcggacgtgaagttcggggtgtgaaggtactcggaattatcgggggatctccaacgaccccacaaatttcccacatactccgaacattgacttgctacatcgtatatagccgatttatagattgagagagcatacctgtaagtagacatgactacaccatttacactgatcagacaaggcaccaaggcaccaaggtatcaaggcatcaaggcaggcattccggatgtacacccgaccaaagccgacgacgcttaacccgattaggactttatatgcggcgtaaagaggctgtagagtgagcattagtttctcaaagatcaacctggagactgggctcaacactaaccctatatcggcatcgatatgcactgtgacttgtgtaagagatcctacgggatcgacattagcgcggttatgttgatgcagtttgatatttcatcgtcaatttctgcctacaacttgcagtatatcgtattgtatgaacggatttcgatataggctgcatttagtcgcttcaagctggctgaattagaagatttcgttggttcttttacagatggaagagaaaacatagcctcctttccagctataagtttacaatttattctctggcacgattctatggttccaattagttttcgaaaggaaaaatgtaagttctttctatcctatgtgactgaacttctttgccactacagactcgggaggagggcgagctcgtataaagtagtataaagctcgctcttatagacttgggaatctataaaccgtacggagcatgcataaaaagattatcgtgccacgaactaggctgtcccaaccccaggccaaggttttattctcaagaactacggattctcgcaccatagcattgggtatggccgacacataccaaccgcccggcatgcaagcttgctttttctacgtgtctccttgctatcatgcattataaaccatgttgcctatggagcagaatactacaaaattcaaccattctaccccaaagaagaaaagccagcgcttccaagtatgatttattggaccagggagatgaactatgaacaaatatgggcataattcccaatttccacaattacaatcctagtacggagtactacgtatgtgtgcctttacgggtcggtccgtttcgtatacgtcgtgtacttctgtcagtgcgatttgagataggcggctacatgagggggaagtcttactctcagtcttactccgttgatctatactccctacgtccatcaacatcacgagcgccggacggagcacgatgtcgcaaaataagcaaaaagtatgccaaattcccagaatcaccacaggaagttactttgggacaaaatgatgccaaagtgtccgcaccgaactaatttagatatgcatcatgtaagaaatcaatcttttagtgatatgtaaattcttttgattatagggactgcaggccgaaggtactggctcccgtctctgcgaaagtacgccgccactactccgtgcatgggggtgctttatttgcaagaatctcaatacacttcattggcgcgatgtatacgctttccgaaagtagtcttcttgatatgtacactgatggtttcgtcttgctctctcaactggggactgtgtgtatcgccgcccctggcacctgctataccatgaacacagaggtaatcatgcgctggcacattgcgcatggtggcttggctggctctcttcgacccgtcgctatttgaattgattagttggtcgtggcaggaatcgtggcattatcacctggaatcaattcagaagccggctgacttgaagcaatggacgaactctatctatcggtacagtcgacaactttaatatatagcaattgagtaaagacatagtccatgatcagtctcagtctatttcttatccttcctcgctaaactgcctctgggccgggctctggcatatcccataatgagcaataagcgtcaggtcttcgtttcgcttcatcatcgcgactctccttctctcggcgggaataggcaacgacttggctatgcagcctaccattgggggattctcatttctcccaaaaattccaaaggactagactgctatgctttcgacgttagcgatggacttatcctcgatcctgtaaataggcttaattgcaatgagggatacaattggcactttcgagagaaagtaaacgttgatccaacccagggtggccaccttattggaatggttatggttggaaaggtgcctcatgaggctatcgatgcgcaaatctacggtcttcttaaagcaattccacttccccaaaagggttcacggccggagcaaaactgcgttacttggacgaaagccgtaatttacacgctccgagagaatggttttgtggagatattcgatatcgatcggtttatggacaagacgctcgcattcgcggatcaacgcatacaccgcacaaaatctacacccaatagaatcaactacaccagtcggagtatgtgactcgtgaaacgcctcatatggagggaaagctatgacacttactatggaagggtggacggactaagaaagaagaggagagaagaagagtgaggaggggaaacgggaggagagggagaggaagggaacgaatcatgttatatgagtgaaagccttaggcgttcgaataagatctcattgcgagaccgatgctgtcacgcaagccctgaatcagatgctctctccctcgccagaacatttgtggatcatccaatagcctccaaagaactcgttccgcttcaagcttgtcgtcatatctcttctctaaagcatttgccaatccactataccattctggctgagctatcgcgccgtagtttgccttggtatactcccaatattccgggtaccagccgccaaattgccaatcaacgatcgcagagaccttgccattatgcaccataatattccgaggagcgaggtctgcatgggtaaagcaacttcgatagcgacgggagtggcattctgcgatctctgggcctaattcatccagagggatatccgctcgaatgtatgagtggaatgcttcgtggctcacaaatggtccgaaaccccaacttccgactcggtgatcaacgttctcaccgaaatttgtggatgcaactattccttctcgcggaggttccagtttccgaagctggctaacatatcccgcaacctggttggtaatgtacttcttctgatcttgcgatagttcggcgcggttccatgctatatcgagactcgttccacggataaactccatttcaatatagaaccaataatcgtagtagtgggtgttgaatactttagggacaggaattgatgtgtgctgagcgacgtatttcatggcttctagctccgatataggacaaggccctttaatcattctgccagggctgactcggactccacgtggtccaagtttatctgctccaaaggttttcttgccaatccatagtcgaagtggaagaagataagaggttgggtgctttttcttattcgccatggctggcttggctcggtagatggtttcccttgtattattgatagggtgaaaagaaagaaatgtgaatcgaagagtcggttgaatccacgtttcactgtagtgcttgggcttataactagtaatttggcccaagctattgtagctcttcattctatatacaatgttagaatggttccaactagtcaatcaggcacactatctcattattacccaaaacagtggaggagtacgctatccaggatatagaatcaatcgtctatgtccttgcaaatacggggggcgatgcggtctgatttgagaataaggtgtggttcaggggtacaggtaggaaggaggcgagcagactgtttacaggtgacaaagggtgggtcacatgactatcaacacgagcatcgagttgggatatcgaaggcgatgtgaaggtccatggagttctaaacatttatttcgtgtgatttcgtgtgatttggagacttcgatattggctatagcactagtataaacatttccccacaaacccacatctaaaagtaaagggatccataaagacttgtagtaactcatggtgagctcttcggaccagcttccagtagatgatcccgcgagagacatagatttgacatgagatgatgtgcagtcaactccactttgagatttgtatcttgcatctctccagaccgagatctggtggaaaagccttttgccggaaccaaattggccggcaacttcctaaattcctcattccggggaacatctaccaacttggaacatcacttggcatattgttcgactaacatacttagatcaagactattccagactgtattgtcctgtctgttgtccacatgagcatcccttctcatcccttctcaacatctcccgcattcgatctccgaatgcgattctatgccttctgatcatggcgctcgttcactcgacatagaccctaattgatctatcgcctctcaccatgctcgattctaaaccctcaatttcccccacggtcgacgccaagtccgacatccccgcatgtgccaccaaggaatcctcctctccaaccatgctccgccccgagtccgcccctcgaacatttgctcccaatgcatccctcatcctgatcggcatccgcggatgcggcaagcgctcgctaggctttgtcgccgcgaccgcgctgaagcgacgcttcattaccgaagaccactacttccgagaggttacaggcgtcacgcgacaggaatacctcaagcggtacggcagccaggagttccagcgacgtgacatcgaagtcctgaaaatgatgctggataaccaccgcacgggctgcgtcgtggagtgtgggcttgccagtctgacgcgacctgtgcaggatcatctgcgtcgctatgcccggtccaacccagtggtgcatctgctgcgcgatatcgatcgcattcagcagttgctcggtttagaggaccaggcggtacggttgtttcgggagggggacccgatgcatcggatgtgttcgaatttcgaattctataatcttgaagatcgaacgcgtgcgtcggaggatgggagccccgatcgccggtctgcggattattcattcaaactgcaagaagtaaaagaggactttacgcggtttgtgcagtttattactggactcgatgtgaactattcaagctacgattcgccgttcgttctgctggagacgcccccagaactgcgctcttttacccatgctatcttcgtgcgatcttccgatctgatcgccgacaatgtcaacctgactgaacttgaatctggtggagatgccattgagctttgtgtcgatcgatgggccccagacatggcagccactatcagcaaacaggtctctgtcctgcgtcgaaatgcgcggacgcctgtgattctctccgttgacacctcatccatcggcgtccgctccccggagccagccacctcttcttctcgatcttactttgatattctcgcgcacggtctgcgcctgggtgtggaatatcttgttgtagacctaactcaagaccaatcccggctggctgggactatcataggtcgggggaataccaagatcatcggccagcaggtctttgaaccatcttcccccactacatgggacagtgcggactgcgtcgccatctacaacgaagctgaaaagctcggctgccagctcgtccgcctcctccgagttgcaacaaatcgcgaggacaatgccgctgtgactgagtttactaataaaatccgatcgctcccgggagatcacccaccgctcattgcctataacgttggtgccctagggcgcacctcacaagtgttcaactcaatcctcactgcagtaacacacccagcgatcacccagtctgcagattataagcacgacccgcaaataacctctcgcgacgcagtccgcgctctattccaaagttacgtgctcgacccgctcaagttctacatctacggggagaatgtcgcctacagtttatccccggcaatgcacaatgcggcacaccaacactgcggcatgggccacacctacagcatcccagagtcaccctctctcgcggtattagaccgactgggccgtgatccacactttgggggatccagcgtcgtgcagccatggcgcgtacaggtatatcaaaagctcgcctcgaaaagccgacacgccgaagccatcggggcaatcaacacgatcatgccgctccgcggacacgcagacggaacaatgttcccacttcaggaacaagccagccgacgcaaccaagccgggcgcgtgctgggatggtacggtgaaaacactgactgggtcgggataatgacgtgcatacggcgacatctctccccgcgcaacgcgattagcgcaaaaacaacaggcctagtgattggcgcgggtggcatggcgcgggccgccatctatgccatgctccgacttgggtgtcggaagatcttcatatacaaccgcacgcaatcgcgtgccgaggaagtcgcgcgttatttcaactcctgggcgtcgtcgcaagtcgactcggctgaggtagtttgtgtcttgaagtcgcttcaggaagactggcccgcgggcactgctcagcctagtctcgttgcgtcttgtgtgccggctgatccagaccgagatgaaccaccggcaaactttgagatgccaatgcagtggcttgggagtcctacggggggtgtgattctcgaggtgagcttttttcccccgggatattttgacttcttgtcacacgtactaattgcatatagttggcatataaacccctcgatacgccacttctacgacaaatgcgccgagtccggagcgagaccggacggccttgggtcttgtctgacggattagagaatgttaccgaacagggaattgctcagtttgagttgatgaccggtcgcaaggcacctcggcggcttatgacctatgaggttctacataattatgtgggtgatagtgggcgttttgacgagaagactattcaggctcgtctagatggtgttgggtctccggttactcagaaacaggaatagagtgtattttttatgactgtgatcgtttcttcttgacttctttcgtcagttttgtatatataaaacaatctcaaacagtttatagcagactcgactcgatataatctcaatcgcgtgcgctgataacactctcctatcagcacaccgcccggcccgagccctctttcttttgtttgggtctcgtcagcttcaaactcgactccccctgaggtttctttgtgttcctagccctctacaatatagtcaaattgacttgaatagggtatactaccatcaatgccagggttttcgcccgagcagaccgactcgataacggcaacatggaagaaacgcaagcgggaccatgaggagtcaaggactctagcacgtccgtaagtcttacaatgtatctcagtgaggtgaaaatatagattaacatgcttttcagaacaacatatgccccatcctaccgagttgattggcccgaatacgacggtagctgctcactgcctctatcacgacacccagaaggaacagacatatccttccgaccacgctgtctcccccgcaagcgccgacatatccaaggtccttatatagcactaccgtctcaccagttccagcctcaacaccaactccaacacccacatcaactccaacaccagcaatccccgacccacctctccccaaatgtctacagcaccccaaaccaagacccatactcacccccggtctcccccaaaaccctcgtccccttacactacccaactcaacaatccgcctctccctccgccctgcgcccctgccacatctgccaccgccgcccaacaacccgtcaagtcctcgacgcctatgcagactgtgatctctgccacgagcgcgcatgcttcatctgtctccggcaatgcgacagcacatcctgcggcggaacattcggtctagcagaagatccaggaatacacatgcacatgcgcacaagctcaaccgacgacgtcagctacggtgccagtgaggcgccgaggaggaaaatatgctccggctgtgcagtggaggaagtcaccgagaatggggcggagattgtacgctgtcttgactgcgtgcgtggtgcgggctcgtgggctccggtggctattccgtctgattgggatttggatgacatgcggcatgaggatatgactggatgagggttatatatggagttgatttacttgccttctaccgggggtattgaaagcggatatgacagaatgacagatgaaactatggcttaacattctttacaacctcagggttgttgctgctccttgggggtggctttttttcttcggagtttgatcctgggactggactggctgggattgaggcgggtttgtttttggcatttatattggacaaacagcatggcaaattaatgatttttattgctctatattgtagcaaatagcataatgacatcggcctttatatacccaactctatttattgacagactatacatactactcttggtttacatcgaaaggtagaaaccaagccaaacctaagtaaaaagccaacgcttatattcctgtccaggtaggaggtaactgagcgggcaatgcctcagtcatggcttgtaggcatatttcctgccattagtagtaaggcaagtaggtacttacgatttgtatgtaaaccactaataaaatcaagtcttttttgtcatagcattattaactgctttatcgtcaactactttagcaactactagccggacaattcgggggaaaaatagggtttcggcacatcagccttgtggggtgccctagtccaggtccaggcgtgaactttcgtctttctctcttctcactgcatgattgtctgttctacgattctacagatcggcgactatctggtatttgcatgtttgtaacttgctccttctttctctcattcctcatattattttgaatagaatacactctgcttcctttgcaagatctggcacatcacaacactttcctctcatcttacatctcatagcactatcacttggctggtcacagcattaccctctctactatgatctgcgaccacaccagcactgcatactagcactatttaactagtgctaccgcgaccgcctttaaaatcaaccgcagctatgctattgctacatcctaatcatcctcagcgtcttcactactccatcctcgcccacactacaaccacattcttaccaggatgagctggagcaccgtgcggagggtatggagggtgccgccagcgaaaatatcataagctcttcttcaagctcaaaacctcagtgaggaagctcttgggcaaccacatcgaccgaggtaagctcaagaaagcaaccgacaacctagaggataagagcaagcaatatacgagcgtccggatctcagaaatgagcgtgaagaacgtggagcagtgcctctatcttcaattcgatagccatgatcgggagatgaaggacgtgcagtcgcttccgctccctacctcggtacgcaatttaagacatagagtatcgggggaatctagctaattggatatagtgactacactaggtctcattgagaagacttttggtcaatctagaaccaccgaagctagtgcccggtaggttattgaccctatcattcttaacgcatgcgacagccaccgcagatatcaaaaatgcgcagctattgaatatccaatatgagaggggctatactttcggcccggttacccttgaccgaaagagggtggttctttctggcagaccggactacggtgtctggtatggcgagagcgagtacactggatctatttggcattttttaaaaattagtcacaattcaaaggtaagctggttcatatcagccaagtgaatcactctgatatctactagtggtcagaatttgctgttatcgtcgtcggggcgctctcgagaagccgttcggtttgctagtgtggatgctacggaaggcagctgccatctccccaggaaaccttggcggaaacttacagtggagtagggtctgaggagatggataactattgatcttatccctaagtaagatagtattcgaatgagcggtgctaaggggaaggaggagtgttgtactgattcatggcgcagcatggcgttggccgacacctcttcccccttctcacttgagtcagctcttattgcgaggccatcattgctagttgcttaatctctaccttttaagccctctcaagcctctctcatttctccccaccgtcatgtttcgtgcaccttcatactttcttctcaataaagatccccgtaggccttgacaagtgctgcagcacctagggaattttggtgctgagttagggtactgcgccagcataattctctcaagaattgctttaaatggataaaatgggtttggccgcctggcacaattatctaccagcactttatgaatatggtaagggtatagcctgagttaaatctccaatgttcatccacatacaaccctacttcttcccaatctcaatatcaatctcgtccctccatcctccagctacctaccaaacctcatctgcgctccagcaaagtgccaaagaccacgcatatacccctgatactcaaccgcctccccatccccgataattccatgactgcgcccaccggtacaatacatctcggtcaacctcaactgccatggcggatacccatcgagcttaaggaacggaccaaaaacaagcaacagatctggctctggcttgagcaacgtatctggcatcgtgggatccatggacagtggctgcgtagtgatctcgctgatctccgcgtcgaccaactccggtgtgatatcttccggtgaaagcttgccattctggctcatgtccgctagggtcttagttaagtcgacgagggtctcacggccatcggttgaggagaggaggaggattgtcagggtttcgggttgggttgtggtgtcgatgttttttgagatgggtgcgctgcggtgtactgggtggtgaggagcgtagagttggagatttggttggtggctgggggtgccgtagtaggatgcgagtttggtggtgattatttggtggagagccggaatgcaggatttcaggacgccttggtaaaggttagtatcactctatatatcctagaatatagagaggagatcattcataccggacttctcgtatatactgagctggcaaattcccgaacacgaactccaggccgccagttcagcaatctcatccatcaacaccgcgagagcatcatcttccttccgaagcgtgagaatcgcacttaaatgttgcggcaagcgcttgagattcttcacatctttccggatcagctcgggggtgcggtggtggtgatagacgattgcgaaaatgcggtcgatgacggcatggtacgcctgcaagagacggacgacaataccgaatatgatatgcgtgatggcataggtgaggtagtaggtttgcgatttgaggaatgtgcggacaggcgttttgcgtggtgttttgcggcgttcgctagtcgattgaggtgatggtttctgaccaagctccgtggggtcggggagatagctcttgaggagggattcacgttctgctatgctgagttttgtgccacgggcgcgtagatcgccgcgcaggatctcgcggtctcgttgggagaccattgtcgtggtgggtgaaggagggaagtggagatgtggttgtacgacggaattgttgaacagctggaggttgtgtactaatgatgaaaagttgttattgttatggctgttttcgaagtatgtcaaatgatgtaaagcattctttctatttatattacgatatcgagtccagcttcgaatatctctgcctagtgttcaagtgcacactgtatatagaaatagaatatgtgcgtggcagtaaacctcccggaccagatccgtcatctccctcagctttccccggattccttcctacaattattcccccaacagtttaagggagaggagacaccattgtccagctctgcaggcagctcatgtctgtccactaccaatcatgatggacaatgcatccatcatcacaaactccgcccgcaccatcttcccccaaggccccagtttcaccctcgaagacttctctagccgggacttcattgtcaaggagttcattgaagccctctccgacactgctatatcccaccgtcgctcgctagccggtaccgccgccgccgccgccaaccaacccttcgatcccaaacccctcatccgcgccttcgaaagcgcccaacgtcgcctgagcgagctctccggggacctcgagctccgcgagaatgaactctccgcagccgtccgacgtgcagaagcgcaacacagccagaacctcaacacccttggccagaagcttcggcacaccatcgaaaactttcaacagctcgacacgtctctaaatgctcccggccgcgagcatccagcagggacggggaacatggcagtggagacaggaaagcgcctagaggagctagaccgacagcgacgacgagctctggatgcccatttccttatccaatgctgggacggcgtgtgcaatcggggcgagatctcactattggagggcctgcgacgatctggcacgggagaggcaaaggtgcgctccgcaaacattgcgcgccaactgctgcgcattagtcaacgactagacccgcagagctggcaggaacaccgggctcactcgaatggtgggtacgggaatagctcttcgtctgaggatctcagcgaaagcagcacgccgcggcggaacacgcgggagattattgagaagttctccgagacgctggagaaggacttgctaaagcagtttgacgatttctaccgcaaggctaacttcgacggtatgagggattgtgcgactgtgttgcaggatttcaatggcggcgctagtgttattgccttgtttgtcaaccagcatcagttctttattgagcgcagccagctggtgacggaggaagtcggtggcgatccagagtcgtgggagaaactggctgatccggacgcggagctgcctggtgttgaatccagcctccagtcgttggtcgatgaagtcaaggttgtagtccaggaggagtctgctattattcggcgggccttcccctactacgagcaagttctgggtaagttcttacagcgggtctttcagcaatccatccagcaacggctggaaatggtactggagaaagcggcaggtgtatcgtcactagcattccttcgttgtctacaaagctcccgtggctatattagtgccttgatcgaagatttgaaatcgcacgggttgaccgagcatccggaacctgtttcttcgcagacagctttgttgctggaccagcaactggaggagcttttcgttccttatttcgttggatcgtcttacatcgaacgcgagaagcgaacgttagaagaacttttcaatgcggttttgttcaggttcacctgctaccatgcccgccgcaagaaggcggcaacgactttcatggcctctttatcccgggctggatcagaacttctgtcgactacacgcgatgcatttatcagccggttggattcaccagaggtctcacctatccagcgaaaagttctactcagcatagccaagataggcgatacgctagagacaactcgattgaccgaaatcaagctcacagaagaagatggacaacccaatcttagcgatgctaagcggatgctgaagtggctcgctgaagccgtgggccgaggacttgagctcagtgtcaacagcgacacacccaaagatgtctccgccttgctcaacctgcttctcctcgcgatgggagagggatatgtggatgtctgtctagatgccgccctggaagcggctacgtcgcaggaatccggcaaggccgagcccgacttctcctatctcttctcggctcgcactacgatcagcattactacattgatggtgatgtgcatccatgcggtccttatacctctatcagcctcgagcatcaccactcgccgcgatatggagaagcgcaccagccaaaccacctcgcgcatcgaggacaaaatcaacaccatcgagcagaaaaccattgacgccacattcgcctgggttagtagatcgctatctggccagaagaagaacgacttccgccctagggagagtgataacaccgcatggttagagatgctacaaactccagtacgttccatctaactacccccaaagaaccctactaatcccaacagacctgtgcatcaatcacctcatttttaacccgtttccacaatatcgcgcgcacctcgctcccatccagcggcgccaacgtgcgccaagtgctgaccgagatagcactcggaatccgtaatctcctcctcgaacacttcaaacggttctctgtcagcggacctggcgggctaatggtaaccaaagacatgacgcaatatgctgacctcttcaaatcctgggacattgacgaagagaccaaaggccccggtggcgcgctggacgtgcttctggaagtcggcagtctattcgtgattggcccggaggctcttcgcgaacgaatccgtggtggtgctgccagtggcacgaccggtggccccgggggttcaggacgcaatgctgtccaggagggtaagttgagtgtgcaagaggtgcgggcttatatctcgcgtcgcgaggactccaatacttttgctatgcaacaggttcttaatgcattgtgaggaggagatcttggtctgggatgtttataccctattgtttttgctttgatgggagcgtgttgtttctactgggggatatagaccggcgtaacaataatgcatgcattggtacctgcttgtcttgatatattgctttcgtaatcttgttccatgattgctttaaacaatacgaagataacatctacctagagcttttgtatgtcatgtacgcaccatccaggcatcgatgcgatacgccctgtcatgcgttgcacagcgctttccggaagggcctgtataagaaatccggaacatgccaacccctccgccagaggttataaattctctttcccctcttctcagacttccctgttgtcgctcttctgtcacatcccgacagaactcccaactcagaattctgtcgctagcgggtgtcgccgcatgattcagttcactccactgctggctatctgagtggcctttcatttatgataacagtctcacagtctaacagtctcaactgagcccggcagagctgcacctctcctgtgccgccccgtaatgcaaaagacgggtgttgacatggcatcttgatatcaaccagcccacaacgcaaagtctgctgacggtatcatggtgcagggtgcatctccatcaatcgataatcatttgcatcatgagttcatctatggcaatgcctggagcagctgaatgagcccgacgaagctgaacctcgctaaagtacgtatgatcttgactgacttggtttctctccagtcctcttccaaatgatcgtcgctagtgcgtctccactaaggacaaacagaaaataaaaaaacagaacgcaagccaaagcaagaagcccgagatagaaatgcctagattccaatgactgatcggaaagacgccaagagtgcagagaagggcaaaggccatcttcaacttcgaagtatgcaactttttaatctttacccagtctcgtttgggttgactgctaattcttttgctctaacaggaggaacaaaacgggtctttgtgcccttcctcggttagggctgaatatttcacgacgtcgcgtcgggtaaaaaaggtatgacatcctttatgtacattcagagttccattgctaacatcttcaaggcaggccagtatcaaggattcttcgtataggtctccgcaattcccgactcaggatcctgatcatcaccacccatccctcttatatactccgagttccctctccaaatcccacatatcaaagcccatgcgcagagcgactggtgccacatcagtgatcagagccatcgaaattcttctattcggcatcgcttgctcaccccctgaacaggcaaggaagagatcattgaagtcatggaattggtcaagatctctgggtctccaaatcgtccactataccctactctatgcctgtttcgcggaggacctcatgcatggtctgctggggccacactcaagagggttgagcccggatacctttcatgaaatctcgaaggatgatctatatgttggttatgcttaccactatatatttatcctatacgtaagtcgcaactttgcgcctattgcaacccctcctccctccaccccatcactacatcagtatgaacctgctgaccaatgacacagaatatatatcctggggttgatcacacctcttctcagcgtcacgtcatgtctatcatggctcaatggatgactattggacagtggacgaggaaaaccttcgggttatgagcatgaaagctccaattcttgcttcagaacatgctgatagctgctcatgggaagttgggcggaaagaaatgcaccctccgtccgagcaaccaggatatctcgcagccccatcgtgggtatatgacatggtgaaggcccctcatcctgtgaacgaggtgatccaaaaagatgtgtcggtaaaaccacaacaaacgctaggcgcaatttgagatgacaaacaatccaagcgaacctgtttctgctcacgacaatcttttttgatttgaacaagacggcgaatatactgagctgtgagtattcaaagccaatattctcaagtctagactagactaacacttgtgattcttagattctccctgttcaatcagagaaatcgcttgggaaaggtggaaaggaagaaagacagctcagctgcttagaagtgtggtatagctcaccaggtacaactgcactccatcttcggggctaccaggatgagagcaaaagaaggctacaattaccgcccatcgagcgagaggaccgagatgtcgcttgaggaaaatacgagagaagatggagaacaacctactgaacaaggcacttgaaacagaatgcttgcagggatgaaccgcactaccattacaattatggaagcgtgttcgccgagaaattaatccacatgattgcaggcacagggcacagaagtcgccgtccgcaactcatcgaaaaggagcgaaacggactacaaattcggagacttggaagtagcgtgctccgaagcatcctatacttgcttcgcgacatgctattcgaaaatgtcttgaggaggatgccatgcttacttggcaacatgctgtgtggaatgaggtatccaaaatcattctactgcccgtgatatcctcttctggctagttcatttctctcgtgctggtcatagcggacggttccctcttcaaaaaaatccgtgatgacaccacacggccgtccgcctcagccttgacctgtacctggataatatcgggtcaaggttgaggccggcttttccatagggtacaaatacatcattgtatccatcgagctggatgtatggaaccagataatacaggaggcaatcatcgacaccgcaatagcacgtggtgacataattttcgatccggcatatgagtgaaaaggccaaaagaataccggcaagacagatccggagaaactgggtatcatctgccatctaggtgtattcctagttgctattgccctgtgcttagacgagaaactggatctcgctggtcctgtgtgtttgcttatgctactgtctcacaacttcacatcttgccacgagcaggtagtagtagaacatgtgggtcatctgagaagtttgcagctgaaaaatgatgggcaagctgtccggggtcctggtgttgagccaggttgatttatagtcataggaaaaggactgattggggaacattcacacactgttccggccatgttccttttgcgttttctttgcttctatgtctgctacttctggttttgctttttgcgactatgttgatttccacatagtacacttttcagtggaaaggattgagctctactaattctatagtaaatcttcatgtttgaatagagatagtacctaaggcatagatccaccacatccacactagaaaataagaaaagtaaccatggaacaagcagacagtccggtgaaagctcaaccttggatgtctcaggtacagagctgcaatattatgtacaagccttccgggataagtgggcagatccacgtacaagtttcatcttgccctgaattgaaggtttgatttgtaccatggtactatggctttaatcttactatgttccagttgatcctgtttcttgtaacatggcatgtttctcactacatctccaatggttgatctggatatcaattgtataaggctccttcccaggcaaggtttgtggctgaaaaacccaattggcggcccgaaactttaccggtgaactgcccaattcggaacgttctgactcctgaggttctcaattgtcgactttttcttttttttttgtaccttacatgttatacggagtcgaaattacgacagcggaagaattatctacgtcttcaggtcagtgcccagtttaaaggggctatcaagcctattcggcagtttatctcccggcacagttccccactaagcttacagactcgggtatcatcctaccagagagagacaagcaatggaggtgaaatgcagctagtagctttagttcgcccaggtaggaagaaatatggacgatcatcgcgtcagatctctctggttcgtatgttgcaaggctaaatactcggagtctgctccactgcgcaacttgtccgagtacataaatgaagactgtggaactattgagggcttctcttgggcaagaattgaagtgctctaatattatagttggcttggcattctacgattggagaagcaatagctattctatagacacttgtatggaaaacagggaccacaaaatgattcagttggtccgtggtaggcactcaattcacgacccgcattagtttattcttaaccgtctccatatttatgttcttctggcccggtaggtggatggttcctgcatctctgaagagattttgcagcacatcgcagatacaaaggccacggaaatgatgctacactaccatatcctaatacttgtagtatctcaccctaggttgagaataatgatgttgccataacatcctcattttcttcgctcaaattccagctgtactagtatgccctagcagttctagtctcacaaatggagacgccacccaacctggcccacagtctcaggcaagaaatttactccagggatctttatttgaaaggttatttcgataataaatagaagagatgccctcgaagcccctttcatagcgagaaatccactctttcactggtgacctcgggttgccgtcccttcattctgacttctatacattcatttatgattgcgaattgaatatatacccccaatggctgaagaaagccctagaaaatccatcgtggaagatgtgttcattcccaaagaactacttgcgactgccaaattcaactcgccgtgggaattggctcgatgggaacattctctccccgaaaacagtcgtatatcacttccggagcctcgcacctcttccaaacgtcctctgagtctttcttctctgcgagtagtggcaagaccaaagcctgcaactcggtctcgtggacgcagtgatccttctgcttttcagtgtatgaaattgatatcctatttctatggcaaagacttgtagaaatacatgagagatgatgataatcttatatctcaatactgatcctttctcgttcttcaggtacattcgactactatgaagagtccgccacattcgagcctccctctccgatccccgagaaagaaccaataactccaattcagaatgcattcctcagtccccaatcactcagcaaagtcagctctcagacaatcagcagcgagcagagcagcctgcaagaagtctatgaaaaagccaaattgagaggcgttgctatccaacgaaagcattgggtgcggctattgtttcaatatagcatttatgctttcctcgttctgttcgtctactttgtcctcgtcggtatgccactgtggaaaggtgctgtctggtggctgtattattttgtccgaaccaagttcgttatccaaggcggatacgcaattatcattggtctggctgcattgtaagtgttttctcgagtcgccaagtttcttgccctaacaaactagatacgcattctgtcctctgatgatcctcttcgagaaggatcctccagccctagattccgaatccgaatctccagacctggaaagtaatatctccaaggtaaaagcaactgctctcctcattccttgctataaatcagcaacaatcgtcggcgcaacactcgaagccgccttgaaaatcttccccaaagagaacatcttcgtcatagcaaacggcaacgacaaaaaccccctcgataacacagaagaagtctgcaaaccctacggtgtaaaccacctctgggtacctatcggctcaaagatcgtggcgcagttcgtcggcagctacgcagccaaagactttgaaaatgccgtcctaatcgacgacgactgtctccttcccccaaacttcccaatcgccagcgacagactaaaaggcaacgtccgatgcattggatacacaattaaaagtgtcggccccaattcttcaaagggaacgttctgccaacaagcccaagacctcgagtacaaaatgtccggtctccaacgtgctttcttcgggaaattcggaagtgctacattcccacacggagccatctcgctctggaatatcgagttcttaaaacagaccttccatgaacatcccggcttctccgtgtcggaggattggttcttcggtgatgcgtgccggcgtctgggtggacgtattacgatgtgctcgcaggtcttcgtcgaaacagagacgccggcttcggtgttctggagtggttctggtggtagtcgtggtggattcggcgagatgactatcttccaacagcggtttaagcgttggaatttcttcttcgttgttggcgtgtactatgatttgaaatatatcttgactagctggaacctgggttggtgggagtttggtgcaaagttgtgcgtttttcaagaggtatgacaggcacatccatccatctaggatataagctaaccatgacaggtctatgaaaccctcatctacctctttgcccccttcatcctcccaatctcatttatagtccgtccctcattctgcggaatgctactgggtattacggtcgcgatgtacatcctcaacgtcataatcttcaacgagattcacctccgactaaagaaggagcgcattgactggaacgtcttgttgttctactatacgttctacaagatcgcgttgacggtggtcaacgtgttcagctgctactggtcactgtacaagtacgcgcggtactttgcgcagcggcatccgaaggtcattgaggaccgggatgcggtcgaggtgttacttagccttgagaaggattcgggttcgaggatttcggttgaggatgatgttattccagttgatggtgtgctagggaggggcgttgcgaggaagttgacgataacgaaggttcaggctggaaagaggaggatgacggtgggatctgagaagggtggatggatttgaatatataaagcgagtatattatagactgtacatttacagagtagtgcatatgcacctggattgcaaacgatcatggtgggactcttcattctgtactagtaatcctcgtttgatagagtcgggactgtctcacatcttaagtgtccagcccaggagaaatgccaatgtccaggtcttctacacaagtcttttgtggtattatctagttcaacctagctaccattgcttacttgacaggggtctgagtcctggaatcgatagtatcgccaccgtggacagcatcaccaaaacgggcacttgcatcagatgcctcgtatcttttcttgaagctaggaagaaacacaccctaccgtaccagcggtgaatgtttcactcgtttgcttccacaaatagtaaaatacaacttgcagatgatagatcatgtgtaaaagcccgacttcgcacgcctcgacgtgccacgacgtgccacgagtccggaaggagaccccctcgtttgtctcctgcaattggagttatatgcattagcccgaagcaaggagaataaatttggattgctctagagccaggaaacgttcaagggatttgaagcgattgctaagggatacgccacgttccgtacttgagcagaagaaggggtttattatattgtcaacactgtcgattctacacgtcatgtagaaggctagactacctatgttttattaagttccagcctaaaatagtagtctggatcacttgcatgcaagtgctattgtacttcggaataatagccgatcatctgggatatgttgtacatatttgtacattgttacctttcaactaaatctaacaaaagcaaatcattggctcctggtaatctccgaattaccgtctggactatgaaggtaatttaatttggctgagtttggtatagatcactctgatttagaattatatgagctgtcaggtacgcagtagtgtaacggtcttcgaagaaccggtttggttcttttggctgtttagtactaagttagtgtcaggttagttagtgttgactttctttgtcctagtggacacccctgccatgaactgttgttctcattggacattgaaaattcgatacatcacttccccccaagggatgtcgttctcgtattgtctgtttcccgaccgttaactccgcgacaatccgatagtaccaaatattgaggaaatagagaccgggaacagggaaaaggcacaaagacctcgtcgtttccaattttcaagttgaaagtttccccagtcccgatctaggataggtgtgtttcagacagaaaatcagcgatctaagtggagccgagattgatctccttactgggccacgtcaaagcgcgtagtgacttggagcgcgtagtgacttggcttcggtgagcttggtgacttggatgggattgaggatgaatgggctcatatggcttgaaggaatatcgatcgatcccgagttcgtttgacaggttcgtaggaagtaatacagcggttcgtgatagatcagatagaggggcatggaaggatcgagaggtgagatctgggaatagaagtatcacaatcacaatcacaggcagagggcgctaatgtacagcatcctgtcacagatcaaagagtttaaagatattcggtattcttgtgtatatatacagagggatgtctccttttactttttactttctattttgattgttctattgaattgttgcacacggactctataggagtatactatatccttggtatacttatacctggactgccctcgtcctttctattaccccaatcctgtcaatttctccatactcctgtacaatgtcggaggactttgagtcgctgcctccagcagtacgaagaaaggtaagggtccattgttgtcctccctcacacagcactccttcgcgtctcaccgtcacacgctcggacttctcatttccctccccaatagctcccctccacaggagatcggcctgacccaatcaggcccgctttctccatatttcccttttctttgtctgtccttgctctgtgattgattgcgattgactgtgatttacccctgaatcccctcagtggaagctggcaatccacactatcgtccatggcgccactcgttgtctcgtaacattggccatcatggactaaaattggccaatgccagccaatgccaccgcatgggataccgttggctccgccccatcccccgtattgcctatccattgttgtccagtgtccacagctaactcgaacagttcttctcgaacgtcgagcgtttacgtattcggctagcccagagcgatcacggttcccctgcctactccacatcaaactatcagacggataatcgggtctatcgagcccctcgtcttgggtcggaccatcactcgcgtggtttgcggaacggatctaggaagcgagggctcgagaagcgtccttcttcttccaagaaattacacaaacccggatctcttcaattggcgtatttggccgcccaggcggactctcaatgctttcatgccctgcccgccaagatccaacaaaagcttttctcccccgaagaacgtagacggttaaggaacgcttaccgacaaagtctcatctacgacgccgccgacgaagcttaccgccgagattctggtcgagattctagacaatctcgcgcttccaccgacactcactcctcccaggcaaccgtgcctgttgttcagtcatcgaccgccttctattcggattccgagtcggatgacgaagacccaaacatggatcaaacattccatgatagtttccgctggctcgacgaggatggcgatcttgacttatctctcgatgaataccatgctcatgtggcagatgctgccacgagaaagagaatccgtccctccttccgccgctccttatccttttccaaccatcttcgcaaaacattagagatcacaactatttcggctcggggactcccgcctgtcagccagtcccagccgttaacacccctctccgaccgaagccccgaatcgcctccgtcatccagctcgagcatcgacccctgtgcccaatactatcaagaccccgatgcccgcttgaaattgcgcgtatacctggcatcgccacaaaagtttgacgaagccattgaattcggattcccctctctggatcaaaataataaggagaatgtctccccggaaccaatcacaccgaaatctatctccccgagacccaccctagtcaattcagattttggcacattcttcgaagacgacgatggcaccatggtggggagcccaggatcggtagaaaaagaaccaatcccttcgcccgtgctcaaacagtgggacgcgtcccgaccctccgaatcatcagttctcttgcagcgacgccagtcgtcctggctgcccgggaccaaggcagtcccacaacggcttccgggaaaccgtgagatgactctcaaaatgaccctcactcggccagaccttcgcacctactctcccagccccccgacttcttccacaggaaaagaagaccccttgcgattggctgaacttccgccagcggatcgcagccagtccatatgggactcggaccttgacgagcaaggtatggtgaagaagatgtggcgcaagctccgacgccgagtttgacttggctaaatgtcccgatcgatttcgattgccttccactcgttttatttttaatattccttgattgttctcaacactaagatgttgtttcttcttcttcgtttggcgtgaactcattttcgttctataccattctggactttttttttcaggatatctgattctcgcgtcttgagcgaagttttctttctccacggtgtcctcgacattttcatgtatctatttagcagtgttctgtacatataaccaagctgctttatgtcaattgattcaacataccatcttttccccgttcaccaccttcagggggtttgtagaccaacagactagtcccaattgtatgctctcatccacggttggctgccactagacgtgtttatgggccacggttcagtcgatagggccgataagcacttcacgtgacagcaagcttcatcctaaggccgcagaggccacgcagctccgtcatcatcactatcttaactcacgacttttctacttgcctgtgcatttctcgctgggctctaacaacactctctttttcagcgacttcacattccctcccttaatcgattgaccccgtattcccggtccggtccgctccagctcccaccgcacaccccatcagatgcctaggcagcaccggtcatgatcccacggtggctgctgctcatactgagcctgctgctggtatggacgtcacagccagcagcggcaaagggaaatgaaccgaacgttgtgacccatgaactcaatgctccgcccgccgaccttttctactttcacggcacaaacaccatcctctaccgtgacaagaataccctcaccgcgcatgtctccttcgatggcggagagaaatgggagatcgttaaaggcaaggatggaaccatagagggcgccgtcgagttgatttggagacatccgttcgacgtcaaccgcgcgtacattcttggcgagagtggcaagcactggatcacgaccgaccaggccaaatcgtggaaatccttccaggtggacgtactgccattcgcatcgatgcgctcattcccattggagttcaatggctgggacccgaaaaaagttatattcatgggtctggactgcactatccttggctgcatgccccaggcgttttataccgtcgacgacttcgaaaatgtccaaccgttgcgcgagatgacgctgcagtgtatgtgggctgcgagccgcccgcagttcgcgttggacctagacatgccgaaatcgataggagaccggattctctgcgtggtccctgggttgaaggggccttttgagcatacccgtacagaacgcttgatatattccgataaatttttcaaagacgatgcggatggcaccgagtccaaattggaccacggtaaaccgatgagcggtatcagtcttcaaatccgctccgtgtctaagtatatcgtggcgcgccttcaatcacgcggcacccaggagcaggctttatacgtcagtgacgactcgaatgtgtggcaccgcgcggaatttggcaagcgccgcattgaagaggatgcctatactatcttggaaagcaccaactacagcatccagatcgacgtgcaaactacctggcatgataaccggatgggaagtcttttcacgtccaactccaatggcacctactttacgaagaacatcgagcacacgaacgaggacctgaatggcttggtcgattttgagaaagtcacgggtatccagggtatcacgatcgtcaacacggtcaagaactgggaggaagctgagaattctgatgcaatcaaaaagaagcttatcagcagtattagttttgacgatggaaggacattccagcctctcaaggctgataaagacgagctacacctccattccatgaccacctacgccgctctacacgagatgcccttcccagatcaccggatgttctcaagccccgctccgggcttgaccatgggcgttggtaacactggaggtcatcttgaagactactcggatggtgatctttacgtttcagacaacgcgggtcttacctggcgtcgcgcgctcaagggcccgcaccggtacgagtttggcgaccagggaggtgtgattgcggccgtcttagatggcagcaagacggataaggtccaattttctatcgaccacgggaaagagtgggagtcgattgatctgaagcagaagatcaggcctctgttcctgatctcaacgccggattcgaccagcctcaagttcctgcttgttggcatctccgatgatgacaccaaggtcctcatgttcttcatagacttcgatggcctccacgagcgccagtgtggcaccgatgacctcgaagagtggactgcgcgtttagatgaaaagggcgagccggattgtctgatgggtcaaaagcagttcttctaccgccgcaaggcaaacgcggattgcttcatcaagaaggagtttgccattagcggccctgaattcaaaccctgcaagtgttccgctgaagactttgaatgcgactacaactttgttcgcagcgaggaccgcaaggagtgtctaccagctgtcccgctgacacccccggctggcaagtgcactgagcccagcgataagtacatggggccctctggatggagactcatccccggtaactcatgtatccgcgaaggcggcgagaatctcgaccgccagattgagcgctcctgctcgaatgtcacggggcctgctcccattaccgatggcaaacctcgcgcagaaaagccacagatcatctctgccaaagatacaaactacttctatctcgaacgacaggccagtaacaacggcgttgatgagactatcatgatgctcacagacaaatatgagctgcatatctcgcgtgaccatggccggaactggaagcaggtccacgcggatgagaagtttacggaaatggtcccgcatccttacttcagtgatgcagctttcttcctcaccaacagcaagaaggtgtactacactatcaatcatggcgattctttccacttcttcgaggctcctagtgtgccgaccaaggagaacatccgcgcactcgctttccatgagaagttccaggactcccttatctggattggtcacaaggactgtgaggggaagaactgtcgctcacaggcgtacgtcaccgacaagcgaggcgctagttgggacccgatgcttattggagtcgccgacggcggttgcaactttggatatcacgagggccgcaacaacagtgaaaaactagtgatttgcgagcagtataaagatgaggaaaagaacaataaccgacagctggttatcagtgatgactatttctctactatggacgtcaagtttgagaacatcgcccgttctgctaccaagaacgggttcgtcgtcgtcgcctggtacgaaggagaccagaaggaatacctgaatgccagcgtcagcgtcgacggtcgcacttacgcgaatgtgcacttccctttcaacatcaaggttcctcagtataccgtcctgcctagctctccgcacgcattgttccttcttgtgatggttaacgggggcgatgaacgcagcttcggctctttggtcaagagtaacagtaacggcacctactttgtccagagtctcgaggggctcaacgttaacgaccgcggctacacggactacgatgagttgcaaggcctcgagggcgtggccattgccaatgtggtttcaaatcgggaagaagtgctgagcaagggtgccgccaagaagctacgcactatgattacccacaacgacggtggtcagtggatgcttctggctcccccgagtcaagatgtcgatggcaagaaattcggctgctccgttacggagggcaagggcactgagaaatgcgctctccatttccacggctacacggaacgccgcgattatcgcgacaccctctactcgggctccgccatcggcctgatgctcgcgctcggaaacgtcggtgaacatctcactagcgcagctgaagccgacacatacctcaccagggacggcggcatctcctggacgcaagtcaagaagggacaatatatgtgggaattcggcgcagcaggctcggtaatcgtgctcgtcagcgaccggaaggccaccaaggtcgtacactacacgctcgacgagggcgcgagctggcacgagttccagtttgccgaaaaagaactggtcattgacgatatatccaccgtgccatcagacacatcgaaaaacttcctgctctggggcatggacgagggcaagcgtgtcaccatcacgcttgacttcagcggtatctggagccgcgactgtaacgacgatgagaaagattactataactgggcccccagtcatcccttccaggaagaaaattgtctcttcggccatgtcgaggagtaccaccgcaagagacctactgctgagtgctggaattcctggcgtgagccacatctccacagcatcggccggaactgcacgtgcacccgggctgatttcgaatggtaagcaaaaacacacaatcaccccctcatccaatctaaataccaactaacatgaaacagtgactacaactacgaaatccaatccgacggcagctgcggcctcgtcccaggtctccaaccccaagaccacatcgcacaatgcgcccaagatcccgaaaaggttgaatactgggaacccaccggctaccgtcggattccgcagacaacctgcgaaggcggcctcctactagaccaggacgtgtcaaaaccgtgcccatccaaagaaaaagagtaccaaaagaagcacggcatcagcggaacaggtctattcttcgcgatcgtgacacccatcgtcgccgccgtcgccgtaggctggtacgtgtacacgcactgggacggcaaattcggccagatccggctgggcgataccggcgtcgcatcgcatagctggttatccagggactcggtgctggtcgtggtacctgtggcgattatcgcgggtattgttgcagttgcgcagtctttgccgttacttgttaagagtctggcgcggagcgcgtctggtctgtttggcaggcgtggggcgcagagaccttatgctacgcgtgggtcgtttgcggcgaggagaggggattattcttctgttgttgatgatgaggatgagctgcttggggctgatgattttgacgatgaggaggagcaggcttagactttgacttgagcttaaatttgggcttggattatgagtttgagtatggaattttgatatagctgccttttttgtggtttccgattggaaatgatctttttggggttttgactcttgcgacattatgagcgtgccatgaacctttttgctttctttcttcttcttcttcttcttctttttcttcttgttggtttcggattcggttttcatacgctgtggttgtggcccttggcttttatatacagaaggctctctaggcccgtgggctgtatatcccccattgaacaaaccaaaattcagatttttactagatttcttgaacagaaaccggtaaatggatttaatttcaatggatattagactccgatccaactcctcgccctcttttctgtctctgatatccataaacacatccctatctctatttaagatggtcgggtccgaatgagtcgggcagcaactgggttcattagtacagagaatggaagatgtataaaacagatatatctaaaaaagagaaaagaaactcacctcctccatagtcataactttgtaatttccctcaccgtcgtacatgtatactgggaaagaaggcgaagtaaactcgcgaatactgtatcccaatgagctaggcaaaaaaaaaaggaaaaaaagaggaggaagaaggagactcacaactgcctacacatcccacaaggcgaagcagcaggtttgatatccgtcgcgacagccagagccttgaattccttatggccggcaacctgtgggagttagcaaagatccagacttgggccggttcatataacaaagacagtgataacaaccgaagtagaccaggggaagataacatagaacatacaacagcagtgccaaaagccacgcgctcagcgcatgttccgactggataggcggcattttcgacgttagcgccggcgatgaactcgcccgatgtcgtgaggatgcatgctccgacacggaacttggagtatgggcctgggaaggtgttagttcggtgttgtttgtacttaaaactggatatcgggtgcttatgctgcttcaaagggaaggagggaaagggtcatacagtaggcagttgctttggcgtcaatggccttggtggacagagctgtcagctcctgggttgtgagtgtttgagccattctagttaatgtcaaatagagaggtgttcaaggaagaggggagatgagggggattttatccgctgataggcgataggcgattttccaaggttatgcaacgttgaaggaggagatatggaggtgattggttgttttcagatggttacaatgtacaagatatgagcattcatttctgatgtcaagtgagatgggttcgaatattgctctgatatagaacagttagccctaaatggtatgttgtatgtgctacagtaagaaagttagagaataccacaccgtatcaatacttcagatactacttgatctagcagactagatacacctcatgtcagaattaagcatacattcaacagatattccaattattctacggagatagagtatcttcagatatgggacgttgaatgcccctggacatatggataatgactaagcattgtttccctcctaccccccccccgcttatacgaacatacgatgctctgagctgtaaacagctctagagacaagtcttgtcatcccccaaacatgcccgtaccctttaatctaggcgtccaagtcatcaacggcaaaaagacctttataccactaggtaagctcattcccctgaccagaccaccagtctcacctcaccaatctcaccagtgcaacagagaacaatccagaggtccacgcgcatctatgtaagaaccttggagtatccccgagcctcaccttccatgacgtcctctccaccaccccagaaatgctctcctggatcccacggcccgtgaacgccctcatcctcctctgcgacagacccatctacctcgctgtacggtctcacgtcgaacacagcatacccgagtatctcggcagcggagtcgacgagcccgtgctatggatgaagcagacgatcggacacgcgtgtggactgatggctttgctacacgtggtggtcaatttggagaacgggaaatatgttctggccggatcagagctggagaagatggtaaagcgggcagtcagcctagggccggcggagagggcgcggctcttgtacgattcgaggtttctggaagaagcgcatatggatgcggcgtcggaagggtgctcgattgtgcctttgccgcaggaggaatgcggctttcatttcattgcttttgttaagaaagatggaaaggtttgggaattgaatggaggcatgaatggtcccctattgcgaggtgaattggagggggacttgttggacgacgaagggctggatctgacggtaagggagtttttacatgctgccgacacggaagttcatagggggatgagtattattgcagtgaataatactatgtaacttctgtctttgtgacttctgtctctgtctctatgtctttatgtcttatgccttatgtcttatatcctatacgacttatcatgatattaccatctatcgatgtgacgtcattcatctaaaatccggggtggcctccaaggtttataaaccttggaatcctacttatcattgttgagttgtgcttattcttagcacctacagtttatcatttatactaccctcgaaaagactcgaaaactaactgcaatgaccacaatcctcgtcaccggcgccacaggcaaacagggaggctctgtcatcaacaacctcctagagaaaagtgcccctttcaagatcctcgccgtgacccgtgatgtcaattctgcttcatcgaagaaactcgcccagaagtcttctagtatcacattgatccaaggcaacctcgatgacccggctgccatctttgaggatgtagcgcttcaaacctcggagccagtctggggcgtgttcagcgtccaagtaaatccctgaaacacaatacctcagatataccccgacttaccaataaaataggctgtcaatcccggaaacaccgacgaaagacgccaaggaatggctctcatagacgaatccatcaaacaaggcgtcaagtacttcgtatacagctctgtcgaccgcggtggcgagaaatcagacaaaaacccaacttcagtcccgcatttcattttcaaacacgagatcgagaagcatctcaaggagaaagcaaacgggaccgacatggaatggacaattctccgtccggttgctttcttcgataacctcacgccagattacttcgggaaggtgtttgcaaccgcatggcggatgtatctgaagggcaagccgctgcaggtgatcgcgacgagcgacattggattctttgctgcggcagcattcatgaaccctgaagcttggaagaatcatgccgagtcgcttgctggcgatgaattgacgtttgatcagatgtcggagattttcaagaccttgactggcaataacgtaccgaccacttttgagatgccggtttggttgatgctgtctattgtcagggagatgggtgccatgttcaaatggttccatgatgagggcttcggtgcggatattccggccttgaaaaagttgcaccctggtttgaagacttttggggattggttgaaggaggatagcaaattcgagacacattagtgttggttgttcttgtttggatttcagaggactagttattatgcgaaagaggcctttcgcctcctaccttcgcttgagattggctttgtttgttctggattatatgacaatggtaactgagaaactgagtcaccctgggtgttaaagttggaatgaatttatttgcaatgtttcaattctattctatacaaaaaaataacaagccaagatggcagaaaagctcagattaaataccgttcaccagattcaaatgccgagtagcgagcgagtgagatatccaccagggagtgccatagatgggccatcatcggctagactggagatgcttggcctgacatacatcaagccaggcaagtcttttaggcacaattcgatgcttcacaaatcgagcggaaagcgttaaacaacgcttgattttcaaaagaaacagtaggttaggcatcgagaaggagaagtaaaagtgaaagaaagtgtagaagcaagaatcgtgtttgaatgtatcggggtatagcgcacgatgccaaaatccaaagagttaggtattgaagaattcaaaggaaaaatggggccagcatagtcatcgtccaacctcagttagaccgatagaatagtgacaaatttctatatgcaggggaattgtagcagtctctctgctctctttttttcatccaaaatattgccgtagtccttcataaacagtgaaaataaacgccgagctgggtgctgagcgcgcacaggtgatcccgcacccgcggtacatgcccttgagcccttgctgcctccatagagccttggcctcgccccagaatgaatgtttttgagcatggactggaagtcgtgagacgtctacagtctgcatgcgggactttattgtatcggccgggtagaatagaaagttgtagctcattccagatgttgctcctgcgatcatttgttggtagacggggagcgagtcggaggtcatgtgcgggttcgacttgttatacttgcggaagagcgacgatacgccctcgtatccaccgaaccacgctgcgcttccgccggtttcccggattaaggttcccagttggccccgccagaatcctgccagcccttggtgtcggaagatgcttgcgatgatggccacggggccagcgggtttgaggcctgctgattctgcggggacctgcatcctgcatttcaccagttcaatgggtgtgagtaccagcgaggtgactgagccagatagggctccgctagcaatgagagcggggattggtaggtgctcaacgcctgggtagaccgttgcgcgcagggtatcctggatgagacgatagctgaagaagagacagctggtctccaccgcagctccggccatgggggcactaatgcctctatatagtccccggaagccatcggctcggatagactggcggaaacaatccagtggtcctgcatatcggagaggaaggtgttcggcttgtgactgtagtcggaccttgacggtgtcgaaggggtactcgatgagtttgcctgccattcctgccgacttcggagagtgtcagtctagatcgcccacattcatgtgccaaggacttccttaccgatccaaatataatatcctttatcgcctcaaggccctgattaggcggaagcgatggcagctccatcggttcactgatggtgatcgcatgctccgtcgccgccatcaagtaagatcgggaaaaaagacaaggtaaaagagtgttatcgagggatcatggtaagatgggggaccagaggtataagtagtgaaggaaatggtagtggggggaggggcggtgtaacgagggatttgatgggcttatgaggtgccaagacaccgtgcagaagctaataaggagaaatgaaacgaggacagccctaaacgagcaagaagatggacactgaatgatatagaacagcctgtaagaggaagtcaaacgtggaaagtggacaaaaggtggagtcaggaaaattgggccgaagcaatttctctctttagcggacgccaagacattttatcagatcgagataatcaatgaaaaaactcggtctccgttttgtctcgacgtctcttttgcttcaagtttcttccccccccaatccactttcttgaaacctccacgtggaactggtctttttccaagtcacatattctatcatgtctacctcaacggctacgacatcagttgcgcctccgtctgccggcgtacggaaaaatggtaagtgaaaagaaaaaaaaaaaaataatacgcagtccccacttccctgctctccctcatttccccggctaaccccatcggactttcaggcaaaaactggcatgacaccaagaaggcttttcgtcctactgcgggtttgacctcgtacgctaagcgtcaagagctcaagaagcacaacgatgctgtcaaggaacttgaacgtgagatgaaggaggagcatgaggctgaacgaaaggtatgttgatcttatttcttttctctcttcatctgtctcacttccctttccttttgtatctttgtctggtctctatttcccgtcagcctgtctccataatcatgcgacaacatttcccaagatggtatcactgaccgaagaacccctgtaggcccgtatccagcgcatcaaggaccgccgagaagctaaggaggagaagctacgttacgagaaaatggccgaaaagatgcaccacaagagactcgaccgtctcaagcgcagagagaagcgcaacaagctgctcagctcttaaggccattcacggtcttctctatatctccgccataccatctctccatctcctccaggactgcattgtgtgtatatacatcggcttgttgaggcttcttccttcttccctgtccctggcgggaaagtctgggcactcattctggcgtgggcttaaaaggcgttttttctgaggttaggtcataggtcactactagcgagcaagacgaatgtttttctataatcgcaatatattcggtaacgtaattgttgtgtccagtaatataggtagtaggatggactatactgtcagctgcagagtcgctgatcagtcttcagccttggcgtcatcgatcttcccaactccacactccaacccaaacaccaagcctccaagcttccccaagctttcttctcagaatgtaccaccatggagccttcatataaaaaggcatcattctcaaaatcccgaacagcctccgccacattcccacccacccaaacctccaaccggggcccgagccagaaccagcaagccagcgaccttcaggccaaatcagatgacttctccagattcagtagccaaggaagtcgccaaacagaccgaaaaaagtctcatcgctcgcaccgccatggctccgatgaccgccaaatctccccaaaaggagagcatcgaactggctcatcccctcagcaacaagagccatccaccttcgatggcttgaggtccagccgcaacaaatatcacaagtcgcgggagtcgcgcttccctaatcccatgatccacctggcttcctccgcgagcgcgaggggattgctccatacttggtcgggcgggaaggataaggatcgcgagggcgatgatgggttgttgaggccggttacgagggagacgacccggagtcgatggggatctgagtcgactactggtatgtcagatggtcggaaggggagtctgctcgatacacctggacagcatgagcaattaatgcctttccgccggcacgagattctgtctatggatgacctggagaaggttaagaagcggagaaagctaggcgaggagtatgtgtttttctggcttctttgcgcataggaaatcgactaatggttgttccaaggtatctacggtctgcattgacttcaattgggacgttagcgacagacgtcacccgtcggctagactacacctattacaatctgctcgagaaaatcacagcgctcaactcgactatctcgtcgttccaggaactctccgactcagcatcaacattcctcagtgacttcgaacgtgaaacagtcgaattagaccaggatatccgcaaacagctcaatgacctaaaaggcttcgagccacaggtccgcaaggctgacgcgttagagcaacgcatgaaagtaggccgacagcgcgtcgaagaactaggcaaacgactcgagaccgtacgacacgagatcgatagctgggaacagcgagaaacagaatggcaaacccggactagccgtcgactacgtatcttctggggcattgttacaagtgcgctgttggtgcttgtccttgctctggtcctccagaactggccacaattctggtcttcccacggtgaggcgtcacgtttgacaacgtcaaaccactctttgccctctgtgccacctcagtccgaggtgtgggatcacgttttcggtctcggggaaagaggtttagagtctgatgcagggcttgctcgatatccgtccaaccttgcaaatcgtcgcgagagcctggacaaggctggtccgacttcgacgatccgatcagggcatgatgcagcagctgcggaacgcgatgctatgagtgcgctggatgaattatgaaaaatttttcgctccagatccttgactagatcaattccctgatctgtgcttccgcaggtttctggtttctggtttgtgcttgaattatcttcaatttgtacttttattttatgtttatgtcatgatacccagtccgcaaaggattcgtgttcgtcattataccgggccctcgctcttcttcttcttcttgtcttcaatcagttcgatattagacgcggggattttcttgccgtggacctcgaggagccaatcatgcaggtcatcactgacatcaccctggacggtgatctcctcaacgcccgcaggcgagcgggtcacagaggaacccgtagcaaatttcttgcccaggtcctttgcgatcttcttgttctccaatccgaagacctccaggccgatcacgaccgtcacgtacttgcgcttgttccgctcgacacgtttgatctgaatcttggaagcggccttgcgctcgctatcgcgtgcctcgctggcggcagctttggcctctttcttagcggcgtctttagcggcgcgttcttgtgccgagacggatagggtggagaggttggcattcagggcatctgatagaaagaaacccagtgttaggatgtcggtgtttccctttccgggcttgcggatcgcccgatgcaggtaaagccagtcaagtagcgtgggagcttcgtaccttcagagtatagtttgtcccatagatccgactcgttatctttgagccattcttcgcatttcttagcggtacctccaaactcgcagtactagacaaaagccccgcacgtcagaaacatgtcagatctccaatgagagtatagttcaaaaggcaatgcacgcaggctcggtgggcgcttttcagtggctgggagttatgccacgcacgacgcagccggggtccccagataagagctaagagccagggtccagagcggggaaaaggctgagttttcacttctgggtgactggaaattgggggattttgggaggaactcaaatgtcatacctcggggggtaatgtgcagactatgatcgattccgtcagcgctatattctcaaacgaattggggttgtgttttgcgccacgggggtcctcacctccacagtacacaacatgtctagcctgtacaactggggctgtttctacctcagccatgatgtatgaaaatagtaccgtgggtaaatggtagctatcggcctagacttcttctctgccagaatcaacatagcgggggcggaggggcagttctgccagctacacccggtttggatatcacgtgcaatgacggtcattgattgtcttccttctaccctgctttagtggcagactagtcaatgtggtaatatggtggtgcttaattgctcattattgggccatcttacatgctcagctagaatggttttttttatcttacaccaaatccggattgggacaaacgtcgctcatcagcacgacattacgtatctttgctaatctccccctcggcagctgtctccaggatggggccacatcccttatcccccggttaaccgaaaccggaaaataggcgatgcaggaagaacaactcgataggagccgtttaaggtgcagctgtggttaccaccacgatagcaggccaggcgcgccaattggtgcccccggtttacggtagatccgcaaatggctgataaggatagtcgattgcaatcttgcaactcctgttttgtcttgcatttcatccattcaattgggcagtcaaaaccggtctccgtcagctagctccgttatcaagagacttggaagcgaagctagtggcgaagacaggaaagagtggttacgttacccctgtggatgttagtgctggcgagatgcgtcgagtcaatgcagagaaagtagcattgactctgatactgtcggagccaatgatcggcgtggaatatgacaaacgttaggaggcccgtggggagaccggggtgcgcatcgcactagcgctacagatcaagcctccgcggagaggtggaggtttcgcgaggtgtccagactgggaaacttacgacgttatagcgatcgtttcagttttccatttccaggttcaaacacgaatacaccacggtagcatgcagcaatagacgattatcactggcttgcgatttgcatcaaccatgtcgcctcctgagaattgatgtcgatggctctagccctccaatcatgacggtgctcggtgtatggttgcccagatactctcgatgcaagcgcacagacaaaggcaattctgtgtacgacacctcttttttctctttttttttggtcctttggcatgtttggcgttgtttagctcttatcttgcatattctcgagctgcccgtgcatgggtacaggattaggaaggagttaagttgggactcgcaaattcgagcgaatgcaaaagtcgaagatgtcaatggctgaagagatacgccaccactggaaccccgcgtattcttttataacccccaaaggcattcctattgctttgtactcttggcctcggctagtatctccggtcgatcatggctaatttttcctttaaattgtggtttgacagccaacagggtcctatgtgttactggtacaaaagtaccatgacgggattctagaaaggctagtgcctcggctagtactactgacctggccaaataatcccaaataattcccaaaatcccatccaaactcgtttcgaagtggatcacatcaaaggggtccgactctcttcgaaactaacgtgctcaggccgtgcggatgcatcggcgggctacaggctctaggccgaatggctccgtgaaactccgattatggcgattataggagtagccctggagatagtactttgcatttctatacaattccaactattctatactccgaatactccgaatgcctagtctgtgtatgtactggatagacggagtactgtatattatactctatatcctctatagggtaccctacatactcttcttatatgctccacaggatcgaccgttagacaaggacgcatagcaccttcggtacactaaaaccctcttgcatatctggtggagaagaatgcatcggtctagatgattcagtaatttatgagatgcgtattggatgtgttgtaactacggagtattaagtattctaacagtcgactagctcgtagactaggcccaagtgagactaagacgacgactacagggctagaatagatttaatttcttgtggcaacttctatgttcttttctataattatcaactctgctttatgaatataaacttgttatttgctttttctcttatcccttcccccaaatccccaaatcccccagaatccgggaacagccataatatccaccttggagtttggttccctatcttcacttcttcacttcctcttcctcttcttcttctcttcttctctctcctcccctccccctcttctctcctcctctcctcctcccatccttggggtcttatccccgtggccaattacctggatatgctatatccttgaacggccaatccctccaacttattccctgtgattaattacatcattgaaagaaaatgacggccctgttggcgccccgcgaaactcattcgccattctcggatcctgtgcggtgtcccgctagtcccactacgcagcgatatttcctaaaagatcacgccatccccgcaaaatcacccatgcaagatgaccctcacgcgacggaccccccagtcgcttcaaacctgccctctgtgctcccctcttccaacttcgctcctatcaccgagcaactcgcctatccatctactttaaacaccctcccctcggaaaacgaactcatcctacccgcctacgacacagaatgcttccacaatgccaaagacccagaggatgtcagcgacgtgtcgacagaatcacacccattttcgtggacgtcacagcctccatcggcagatgacaccttaattgaggatgagccatccaggcatgtggactatctttcacatgactggaaggaggaggatatctggtcctcgtggcgttatgtgaccagtcgaaggaacgattatagcaatggagtgagactggagaatgcctcgtggaggacatgggccaaggccaagcacaatctgaagacgatatcgccggaaagcctcaattggtatgtttttgatcttcttaatctttcatcttttgtttatcccgctaacctcgtactaggctcaaggactgcgatgtcacctggctctacgggccattaaaaagttccgtcgaacgtggaacctctccatctccgcctccaagttacttggaaacaccaacctcttatctagatcgaaagccaatcttgaagaagaagaccgcgtccgaggccatccttcagcgatccctgtctcaacatacgttactccaacatgccggagccattctcaaggcccaagaagccgagaacaactgggctcgaccctatttcccaaggtccaacacggacttggaccacttgcatcaccggactggaagctcgacctactctctcggtggcactctcactgcctcgtcagcatctggaatgacatctcccggcgaacggcgccatatccacttcaacgatgaagtcgtgcaatgcatcgcggtcgaagccaagggctacgaggacgattggccggctaccattggagatgagtcatcttccgacgacggcgtagtcttcatgagacaaatctccaaccggtcctccctaagcaaccgcagcactccacgaaacagcttcagcggcgatgggaaaaccatcgcccctctcccttcaaccacgctcaagtatcgtggggatcctccggagctccacactcagacaatccttgaccgatggtcccccattcccacccggacattatcaccaactccctctgtggagaccctacgtccatcaaggccatcagagcccgaggccaactttcttttggatgagtgcgaagatcccagcctggacttcacgggcaattaccccgatcatgatcgtgcatggtttattgaagatactgcatcagaccgcacgccccgattcactgcttcgggcatgatcatgccggaaggcgagaccgagacccccagcagtagtatatatcaccgggtcgtggacactgtgaacacagcccgagacattgctcatgtgatctggaatgtgggctggcgccgctaatcttgatcacaatcttcacgactgacgatggcggctagcccgtcgtacataatggaaaaaggcaggttacaccctgtggcgtttggggggaaagatgagcgtggattggatttggcgcatttcttttgtatagaatcacccgggactgattgtcaggaatcatgtaacgacataatgcataaaataacaaatattgaaacaatcacactgaaaacccagctatataatgtatagatccgcattggggaaattgcgaggttggtttatgataatgtagggggttgacctcgatacaactatttagtcactgttcttgtttcctcccaatcctcaacttcttgatactatatgaaatgttggaatactacttaatctattcatgcttaatagattaaaagatcgacatcaccgagatcaccattcaaattccaattgccccacagtcccccccccctgatctcttcctctccttgaacttctgccgaggtctttcttatgagtttcaaagacatggaaaccgtcaatgtcgccgaattggtcgagcgcctcggtagcgatgaagatgccgtgcgcaaaatggccgtcttcaagctccagagcaacattggagacccgtccttcgccgacatcttcatcgcagagggaggcctggttcgattacgctacttaaccctgaacgcaagcgggaataccctggcatacagtttaaccagtttctcgaggctgctcgatgtcgacaaggggtgggagtgtgttgaccatgagttggttgagcgcgtgagttatgcttgaggcgattgcaatgccctctacctatgttgatgtggtcggattctaatgcgactatcttctagactgtcgagctgatcgtcacccaccccctggtcaacatcctccgcggcgccatgtccattctcgtctctattgtttcccacccgtacatggggaaccgcgcctcccagatcaacaactttggtttccgcgccctgaaacctgcaatcgccatataccctcagttcctggagatgctagtcagccgattatcctccgcggaccatgcgctgtgtgccaatgcgctccaattgataaactcgctcatgcgcgactcgatcacccacgacccggaggcggagtggcccaagtttattcagaggttacaggatctaggcgttatcagagcggtttacgtgcttatgcaggattccgcccttcaggacctggcgcatccgctgttggaattccagtcactcaccaaggtactgctacgcaagtggcgagatatccccgtcaaccaggagacgcctgagcatcgccgtgcgctgaagggaatttatctggccagtaacccggggaaaattcccgacgagcctacggagaatggcgatgatacacggcgctctagacgacatcatccggaaaagtggaggcggcttgggtttgagacggagagtccggccggggaattctacgaggtcggcttcctaggtatgatggatctggcggactatgtccgcagtcatggggaggagtttcagaatatgctcttggagcactctacaaagccagcaggacaacggtgtccgattgctcgagcttcgttggccgtcacatcgatcttatatgagcattttgaggttgaaaagtccgacatggatgactcaaaaacataccttctttcagagtcccgtacgggctttgataagttgttccagcccctgttgttacattggacccgcctacatgttgccggcttacaggccttcttccgcctgtggaaggcgactgccgccgaggaagaggacttggacaagctcattgagctcgtgcgtatcctcattgagtcggtagttggcggagctgctcgaatcaaggatgtccaggatgtcgaagaggaactggccgatttcgaataccaccgcttacgcgggctgcagatggaactccttgaacttacgtacgaggatgcatggggccagcacttgcgacaggtgcgcgaggaacttcatcatgaggctctccaattcgtcaaagagcaacgaatccgatccttgcttcaaggtagctggttcgctctggactcctctaagtcggagtcgggggcggtgcagaagtctagtgctacatatcaatatgcccagctctctcacaaccgacgatacttgcatttcggtcaatttgacctgatgggcgaacaagctccggagttggacaccctaccagagaaaagtgagtgtcaccgagtgctttcccgtaatcacactttttgtatgtgttgctgacaccgaaccgtgccctcaacagtcgatctctcaatggtatcatccgtagtctcgaacgtctccaccagcccagaccattcctccacggctacggtgaagactgcaccccggcaacccgcaaccaagatcaccatccacggctacgcaccctccgcaattaccggacacggaaaaggccacagccacgctcggtccgccagcaggaccactcaaaaggaggtagtcctgctcacgctgcggccatcctcgcagagcattgcgtccgaatggctagatggcctactgatgcttctcaaccagcagcccatcactgcagagacaagcaagctgattgatctaatcagcaattacgggttgaaaatccgcctgctcaatgtgcggtttgacgacgccactttcgcaggtgaggctccccaggtcccttcgagagatggcttggatgaagattactactatgatgtatttggaggcgcatagggggtacttccctctatatatgtgtgtcttttctcttgttgttggggattttggtttctttggctctgccgactcggattctggtcaatatacccgctgtgcgatctgtcttatgaatgtatctatttctaatatataatttaacgttagcaattgcatctgtatctatgtgttcatctcatctcacatctataaatctggcaaaaggcccaccgcttggcgtcataagcttatcggactcgtatctcaatttctccaggtttttgaccaactcatcatggatggcggtcgtcctcctaaaagacaacgcagatctaaggatttaaagcaagatgagccgaaaagacaatcaaaacgaaaagccatcattatatcagatagctccagtcctatcgaaccagcggaacccttcgctctctcctcacgccctaaaccctcctactcgcgcggcacaacaccatcaacccggcttccctcgtcctcaccctctccaatcaaaagaactaaatcaccagcaaagccagactcggactcgaaatcaaagtccctgcacaacttctttccgcccgcgacagagggacagcgatgggcaccacaaaagaccgagaagcaatccctcccgccggtcacggagaccgtcgacgtggacctgattgaggatgattatgactcctacgatgaaatcttcacacagcatctagctaatgagcggatgggtctggcagccatgggctctagccagacacgtcagcctgcgccaaagccagcgccgaagccaaagccaaaggcctcagtcaaaccaccgcggaagacgacgaaacggttccttctgtctacggactctgggaatggaactgcgaaggaggcattggctgcacaaccggctagcgaaccggaccgtcgaccatgggcgcagcggttcgctccggctaatctgggcgaattggccgttcataagaaaaaagtctcggatgtgcagcattggctagaggatgcttttgctgggaggcgtcccgaggtgagtttttgatttgagaataattcgaggttggggttgaatgtcgttctgacagtatgcagaggttactcgtcctacggggtccggcgggcagtgggaagacgaccactatgtccctgctctccgagtcaattggttacgatattgtcgagtggaagaatcccccggtttcggaatttggagctcgcgatcatcaatccgtgagcgcacactttgaagagtttcttggacggggtaataaatttggagggcttgacctcggaaatgccaccgagcccgattctcagaaagacgagaaacctcgggatcagcgaatacttcttatagaggagtttccgactgtgtttggccgggcgtcctccaccctcacggcgtttcggacgtctcttcaacaatatctagctgccgcggcgaatgatcatgcccggggcagttctggatcgaatcacccgcctatagtgataatcgtgtcggagactttgttgagctctgcgtcttcaatctcagataacctgacagttcaccggttactggggcccacaatctataatcaccccgggacaacgatattggatttcaatagcattgcacccacttttatgcacaaggctttacggtctattttggacagagaggcacggaactctaggcgtgtccagataccggggccaggtgttattgacagtatctctgaaatcggcgatatccgcagtgcaatctcctctctcgagttcctctgtctgaaaggggacgaaacgggaagatggggaggcagcgtggccaaaacaaagaaagctcgaggtgaggttgctttgacaccgatggagaaagagtctctcaaattgataactcagagagaggcgagcctgggcatgttccatgccgttgggaagatcatgtacaacaaacgcatggacccgagtctgatcgagggcgatgtcgagatccttccaccgccaccggactatctgcgccactatgcccgaccaaaagcctcgcaggtattggttaatgatctggtagacgagaccgggaccgacatatcaactttcatcagtgctctccatgaaaactacatcccatcctgcgatggggataatttcaccgactctctcaacgactgcatcgatgcactctccgatagcgatatcctcagcgccgaccgccgaccagggcaaggggcgcgcgccgggataggaaccggaatcacctctttcagtagcggtacagacgtgctccggcaggaagaaattagtttccaagttgcggcgcgtggtcttcttttcgcccttccatacccagtcaacagacgggttgggtctggagccggacgaagccgcgctggtgatgccttcaagatgttttacccagcttctctgcggttgtggagagaggccgaggaaatcgatggactgatcgactcgtggatgaaccgaacactcgatcctagacggcagcatctttctcaaaatggctccggcctcacgggggtcagttcctggaaaaatctccaggtgggaaggtcgatatccgccgactcgggaaacaaaaatgacaccccgagtgtggtcacgatgatgccccggcatgatctactgcttcatcagttgccctatatggctgcaatccggcgtcaggacccagattggtggcagttggataagatcaccagcgttcggtccaacgagaatcttcgtaatgatgacattgacgacatagaggagtctccagcttcgcggtcgcgtgggaaacaatccagcagtcgtgggtttggacctcgactgcaactgcccgaagagaaattgattctcagcgatgatgacattgtcgattgagcgtgatatttctgcgtatcatgtctatcatagtaaactatttaatgcgagaacataaacatgtactcagtatgaacaatgtagtcctgtatatactcttcgagactggtttgcatactagattataaccccttgacaatgaagtagttgttgaagcagtttttgataaagtaaagcatagaataagatgtgacgaaagtgacttatttttgctagcagtttacatataaagcgtaggtacctgatacgggagtttggcagaagcggcattagcggtagttacccaactaggaaggtacacctggaaatgcaagtgagtgtctagatcaatgccctatctatatgttgacactatgtaatagagattgttaaagagcttgcttgctgatttctttgttctttgtcacttgctagtttagcaagagattgggatttgcactgtttgcaggactatatctatgggtttcctatttcttgcttctcactcttctctccccatcttgggcctggcttgtcacatcacaccaagtacccttcaatataaacttcaatcgcattagcatgaaggttataaaagctatttacttgcttttatgaaagatacataccaaggcctaaacagggtgaaattctctatttacacttacctatcattcagaagagccaacatactatctaggcagagcttgacgagagatgctagaagcttacagtaccaagaccgagtttctttacttctatagtctcttttctcttacccttacttgaatgcaatatctatagcattcactggggttcatctttgatacagacttgtcgcaggtgaatgagtgcggacacgcttcccggcgcgagcatcctgtataggggtcgccgctttcatgttggccatgggtattcaaactcgacggatatggttcttttccttggtaagactgtcatcgtccggcttagactggtcgatgatacgccgtcttggtttccaacccccggcacgacaagaaggtcccagcaaagattggtaactgcgcggaaacatatccatgagttcatttactcaaagggtacggcgaagagaaccggaatttctacggaatttccctacaatggaaaggcttgcagccagtaagagtgccaggattctcttcgtggggagacatagaagtggcacacccttgtttcaactgccaggaacttctctcggtatagcggatcagcaggaggtcctccttgatatttactcttactttgatacaaagttggtgagctagcgctctagcccagtgattcctaatataaatttcggcctaggcgttgcccttgctatcctttctctcctcctaattaactgcataatatgtcaggggcttgagacagttaggggattaagagtaaaactatatcatagacagcttgaggggggctttacaatggtaaatccggtacatatagttgcatatatatctcgtgatccacaatcttatcttcagccccagctttctttcttttaaccacctcatctcacctttcataggagtcgccctttgaaactcctagaaggtcagaaattcaattcatctctatttgcaattcctctcagtcaatatcgctcacacttgaataggatgctcaatgatcatgaaccctcaaaaggacacgatgactcctacctgatcaatcgcactcgagtctcgactgtgaatcaatcgaatagaaacgcgaacgtcgcttcgcccccaaaatctcgatctcaaaaatccgaggacaagcttgattatgctcaattgaagaaagatgcgccgggcctcgttgctgccgccgcccatgcggcggttcctagctggaccagcatggttctaatggtctctcttatcttcgggggctgctgtgccaatgtgggtgtctagagaaacccccaacgctgctacggagccaaaacaggaactgatcctttacaggtctttgcgctagaggcgattatcaagtaagaaaacaaaccaggctaatccaaacacaacgctaatcctatatcttctccagagaacagcctactgccggtaaggacgacaaccagaaccaatgaaaacaatcgcactgcatatcctaacccaactcgttccacgtacaggtcccttgataacattcgcccaattcgcgatctgcgccattttcaccatcccaaccttcctatccccctcagccggaccacgagctttattcctgcgcccacgcgctattccactacgctcatgggcggtatatacctcttatttcatgagcgtcaacctcctcaacaactgggccttcgcatacaagatctccgtcccactacacataatcctccggtccgcaggccccgtcgcctcaatggtaatcggctacctatacaacggcaagcgctattcccgcggccagatcgcctcggtagcgatgctgacggtgggcgtggcggcagccgccatggccgacgcgcaatccaaaggcgtatctatccacgtcgagtccgatgcggcggatacaatcacgaccgtgacgggcttcacaatcctcgcgctcgcaatggtcctttctgcgttccagggcatctatgccgaccggctgtacgcgacttacggcagagactattggaaagaggcgcttttctactcgcatgcgctttctctgccgcttttcctgacgagttgtccgcagttgctgggtcagtggcgggtggtggcttcgtcgccttctttgctgtcgcatttggattccgggttgtgggggtcgtctggtacggttgggagcactgctttctcggtgctggggcggatttgccacattgaggctgtcaaggctttcctggcgcatctgccggttcaggtggcttatctggcgatgaatgcactgacgcagtatctgtgcatccgaggagtccatcttttgtcggccaagtcgtcatcgttgactgttaccatttttttgaatgttcgcaagttggtttccctgctcctatcgatttacctcttcgggaacaatttggctggaggtgtcttggttggcgcggctttggtgtttgtcgggggtggtttatatggctttgagggtgcacgtctacgaagcgttgccaaaaaggcccagtgatattatcatattagatagatcttgatctaaatgtctagacaaaatgccttttgcgtgagttttctcggttttaccttagagccggttacttctaggagccatgccacgaatagaggaaaaatatatcgatatcatgtgcaggctgcagtagttgtacataaattgagataaagcaacattgtccacaccatttgagtggaaaggtaaggcatcaagcatgacgcaaaatcaagatctcccaggctaccccggagtcagaccaaaataataaaacagttaaccatctataagacctcgcccacaatcttggcggcttccttgtacgtttccaatagccgctcacacttctctctctcggccttgatgccatcatcctcgtagagaagctcgccgaaaagatcttctttataaagttcgctcacgagtctgttttggaccacatccttgcagtggttgacaaggaggtgcatgacagccttggggacttggtctgcaatggtttctcggacgatgttgaagtatgatgagatgagacggcgaatgagctcggtttcgagcatctcacgttccgtgagtgcaggctccgtgttctcgttgggctgtaagagctgaagtcagtcataaccatctaaaatttaaacaacgaatgcgcagtggtacttacgaatacagatatgtcaccaccatactccgacggtgcagtgtatccctcagtcggcataatgggagcccgaacctcggcacgccgaatgctctggctaatgctcggctcaccagcatttggcccttgccggtgggggttcatgcctgccggtggcatggccatgttgtgagtaccttccttaccgaagaagtagttcaggaacgagtcgcgggcattgttcgagccaccgccaccgaacgcagcatggttagattgactgccattcagagaagcagcaatgccattctcgcctgtgcggccaacatgaggagacatgcttcgcgatcccttagaagagtgggttcggacggggaggttttgcttatcagaatattcttcttcttcaggacctcccgtagtcccattgggagctcccaattccttttgacgtcgcttctcacgctttcttttttcctccgctagcaaggcttttctttcttcgtcctgcttgttctgcatgattgaagacatggcagctgcggcaccaaggaagttaggatggttggtgttaatgtaagctctttggatcgagatcaaagattctacataagtcgagcagggccccaggcgctcacgaagaaggtcagatacgacctcaatcaactttccttggagacgagggaaacgcaggagctcttgattgccacacgtgtggcagatcttgataagctcctcatagaccagctccacgcatcgctgactgggtgattcgaggagtttaatctgtggtttgaccagcaaatcaaaggccaactccgggacaaacagactgggacgaggacctgtcgagtttcggatggccgttcggatatcggagacagtcaggttgtgagtgggatcaatggtttccagtgagtttccaaaaacagagttgaaaatgtagtaaatccttgctccaccgcatagctctttcgtagaaatctctgaggaagttccgtcgatagatgagatgaacgacgcggcgaacctggtcatctgctgaagaatcaatgatccccggtgttcttcgccactgaactgtttgtttccgtagctggccaactcttgctgagtctgacccatcaaggtgtttagccgagctttgatatccggaagccggtcacgaatgtgagacatcagggttgtgttcagagtcttggccaaaaagtgcgtaccgcagcggttggccatattccggtaagctggatgatgccggaagaactcagcctctgcccgcaatgcatctgaaagcgattttccacactggatgtcctgctgggaccgattgacaacgccgataaatccaagcttcaagggatacacacgtccagacaggatgtccatcgcattggtgccatggtccatgagatccagctttgacagaacaccgatcgtcctccggcccatgggatccacctgacgggcaagcttcagcgcctcggaattgaccagatcgacattagccggagagaccgcaagaataatgctgttcggcttggcaatatattccaaaatcaaagtgcgtgtttgtttttcaatgtccgacggttgatcaccaatgggcaccttcgtcaatccaggcaaatccacgagcgtgaggttgagcacatgaggtgagaatatcttgaggttgatcggttgtctattgatgcccttgttgcttcctgcgattcttgctgtctccgcttcgatctcttgcttcacttgggcaaagtcatcaaacttgcgtcccggctggtggtggaattcagcccattcgtgttgaccggcaacactggcagccgtgtgtggggtatggacctcatcgttttccggcttatcatcacgttcactgggcacgttgataagttgcaggataaggggccgtcgggtgacaattccgctacctcttggtagaaagtcccttccgacgatattctctaggaccgaagactttccggatgactgggaaccaacaacaacctaagagggaagcggggattagtcttgggttgaccgggtaagaaatgacaattccctctcaacctctgagagctctctacccgactagactcacaatttggggcaagtccaaggaatcattcccaatggtgttgaagaccagatcctgaagcttgttcactgtcacgagcagatcctcgcccagcgatgtcatgatgtcgaattgaaggctggctccttgagacacacaggtaagagttagagcccggagttaagaagagtgaaaaactagtaaaggtacacgcaaagtgaggtcgcgtgcgaacggtcaccgggatccctgaaggcctaagcaactctccttggaaccttggaacattgtttatggccactttttcggcacacgtgatgctgacataagcatgtgctccgatcatgacgtcggtgattcgctggctttaaaacacacatccaggcacgtggatacattgcatacatgttcaaaagaagtaatactacgaggataagatgtggatctagaactacaagacaatgagtcattcaaatgaaccttattgactcattttaattgaaagtggtagtgaactgggtatttatactgaagaaccaaggatacatagtgagatctagtttggcgaatcaatagaaatttgaatttcccctggtcgcattgctggagtcggagtatctacgcatgatccaatcattcgtccaagcgaacatagttggcagggaatagaccttgtttgccattgtactcaccaagccaccagtcgtcatcggggaattcctacaaccgggttagtactgtagatagtgatggggcaaagccgagaaaaacagggattgctccacttaccacgttggagatctttgcatcttcagggaaaccgatctcgttatcctcggcggcttcatagtcatacaaagctgtggccgtgacaccgttggagcttggggtagccactgatggtgcagcggcagcgacaggggtgggtgccgccgggacgggggcagcagcaggctctggctctggctccgcttcataatggtcggaagcggccggtacgtgtgacgcaggttctgtgtcttccacaatctccacatagttggcggggaagagaccacgctcaccctgagtattgacacccacccaccaatcctcgtcgaccatttcaatgtcggtcacatattctccctctcgcaattcaatctcattatcctcggccttctcgtagtcgtactggatttgggctcgcggtccgccttggggctgctcgggctgctgaggagcggttgcctcggccgcagcgcggcctaggtcgtgagaatcatcctcaatttccctctcgtcgggaacggcctcttggaggctccgaacaggcatagcagggggaggggaatattgttcctcgtgtgcatccgcaatactgtcggcagtgccgcggccaaccggcatggcaatctggatcggcgagctctcacgctccggggtgggaggtgtcggggagcgaggaggctgcggtggtggagtaggaagagcctgctgggcgtcatgctcaggctcagactcgacgggtccagaggatagcccgggtacaggaacagggcgactggcctgcggaacaggtggagcaggaggagcgagtggcgcaggcgcgggtgtgggcgtgtcctgagcgaactggtcacgaatagcactcacgtgaggttgtggtttatcctcttgttggtcattggcctttgcatcaacaggttgctcaggatcgtatgatttttcctgtgcagtttgaacgggagcccaggacttgcccgcataggagcttctccactcgctttggccactaggttggctttgaatcggggcaggagtagaggtaggctcagtggttccagatgacggggcgactccgcgctccttggctttacgctctgcccaaatttgagcgggtgtcttgcctccctcatcagcaaaagttcggcttgcagttccaatcggcgcgctcgtggttggcttaggcccgagaccaactgggaggggtggctttgttccagggaaggaggggctagagccaaacttgttggcaacccttggcttgggtagggtggtcaaacgctccgcggcagtagagggcgcaggtcgctcgggcaacgttgttggctgttggttgaatgcagtgctcgatgggacgttgtcattggcttccggcttctgtgctctggctcgaatagcagcgatgtcgactttgccaatgggctcataagagcccttgataattgcggggcgctcatctttcagctgaccagatgcggcagcttgtttccgaattgcagcaatatcgactttacccactggctggtagccacctctaacaacatcgctagaatcatccgatgcagtagcggcaggttggcgactccctgtggggtttgccttgagttcttgtaggttcactctagtgggctggtaagccgattgtaccttttccaattgggtgcgagtcacgggaggggcatctgcaccccatccatcatcattcacaccagctcttgaaggtgtgggcagtacgcgagcagctgggctgggagtgatgcccccagatcgagtcggtgtgaaagcaggcttgctagccacggcaggccggggggctggggcccgggctgaggcctcgcctactgaatacttagagccggaggaatctgccacccgctggacgattccctcgggggttagatccccatctgctcgggctgtgatctgcacatggtatccctatccagccaagtcagtttcaccgcgacagttgcatcaggggaaggaaactcctcacatgaaggaacttggcaactgcagccaggtggctagtaaagtaaccctttgttcgttccggcacaccttctccacaccagccaatgagaacgtttttgggaagaccggtgttggaatccgtcaccttcacataggcgaattgcacccgtccttcggaaaattcctcgatgagatccgccaattcaccctctgcagcacgattggttaatataagataatgggcttggttggtaaaaaggactactaacctccggtgctctggaccttaaggacactctccttacctccatcttgctggaaggcactaacaagcggggtagaaactgagtagacagcccattggccataggtcgcagaccctccgttcccagaagggggtggtgcattcaccactgtctgataactttttgatatcgaagggccattggacgagagattgagagaagccatgactttccggcgaataggcggggagaaggaagggaaagcttgtcaagtttcagatgtgtccacgtgggaggaggggtagctttttcttttgttacaatatctgtatctcatgcagtgtcagcgaaaagcactccagactgttggtgttggggtgggatgtaagttcggggaggggaatagataggagaaggagggagttgacgtaggtgggcatttgtaaacactgaccgggcaaaaaggataaaagcagcggggttgaatgctttcaagatgagaatatcgcgacaccaaagaaaaggataagtacagaatcaagaggaatatagagagaaaggtccaggagaacgatgaagcctaaaggtggagaggagagacgggaggttaggggaaaggtgttataatacgatacttcgtactgccaatacatgcacatgcttcataatatatgcaatgtattatgtactatgtagtatttagggagcatcttcacttcgtagatctatatagctttagaatttaaagcttgaagatgggtattaattctaattcagatattacactctatactctgtatcatatataaaaaatcaatcgtgcaagccttgtatagtcccaaagctatacatacatagttggagatgtgtctattttacgtgtattcttgtgtatgtattttacagctccggggcctggactttcttccccattcttcaccgacagagaggtggggagcttgagctctcgaagagtttttttttcttcttcttcttctctctggtgttctttggtttggagtatcctactttctaattgtgctaatccaattctatactgtccgaaatcgcattgttgaccttgtgtgaaaccccaagttatgcaataatctcatcacaacccttctcagttatacaatccctattcggtacctgggtacacataggatagcaaggggtcacagcagtcatgggacctactcaacccgatttcagtgccagtcagaatgccaacgcgcctgctgattcgtccaacaatgaatcggccacttcatccccgggtctcgaaggtcccgtggactctcctctccacgaaagctctaatgcactagatcagcccgcagaggatattttgcccagagaccaacagcagaaaacggccacctatgactatgcctatgagaagtccatgagtcacgccgaggcaagactcttctatcaacatcatcagctagccgcgcggaacgacaccctgccttcgagcccagtggccccagcccgctcaacattcgaatcacgccttgaagaatcaccgaacctttcggatccaatgaatagtcaaggccagatctctcgcgagggatctatggtgtttgaacacgaacccacaaaactacgattgcaatccgccagtgaacccaatccctctgtgtcacgttacctcgaagacgaccaagacgaggcgaacgattctgcccgaaatcaggcggtgattctagatgctgtccaagggcagggaccatactcggtggcggcggcgagtctgcaaagcgccggtgtggggatcggaggccctcaggttgctagcggatatgcgtctagcagtgatgctgtcacgtctgagctgagtgctatctactgcaaaatcaagaaactacttgatcggcgatcccagtacttggcgctttctttgcagggacccggagatgatcctaaggaccaaccagactgggagatttatcctccgcccccagaaccagcgtgggatcatgagaaggaatatcaccccggcaacatcggtgacccatctgaccttgcaggaaagaagaggaaaatgggccaagatattggggaggattttgacatggaagaattgatgcctctacccaaagaatcgccttggacgtataggctggatggcaacagtgtatatcaggtctttgattctgaaactgctgctgaccaacaaacacctattgttcagatcccctcgttgcgcgatttctatatggatctggacgccgtgatcgatgtgtcgaccgacggacctgcgaagagctttgcgttcaagcggctgtcgtacttggagggcaaattccaactgtatacgctgctcaatgaataccaggagatggccgacagcaagaaggttcctcacagggacttttacaacgtgcgtaaagtggatacccacgttcatcattcggcatgcatgaaccagaaacatcttcttcgcttcatcaagagcaagatgagaaagtccccggacgaagttgtccttttccgagacggaaaacatctgaccttgagagaggtctttgagagtattaacctgactgcctatgacttgagtattgatactttggatatgcacgtaagtctctcatcgcatcccttgttttgatgccgaatctttagaggatgaaggaagatgcagcctagatgcatcaacatttcctctacgctcactcttaagctacaggttttacttttactgactctgacttcgtaggcacacaccgactctttccaccgatttgacaaattcaatttgaagtataatcccgttggagaatctcgactgcgtgaaatcttcctcaaaacagacaattacatcaaaggtcgctacctcgcagagatcaccaaggaagtaatctcagacttagaatctagcaaataccaaatggtggaatggcgaatctcgatctacggtcgttcccttcaggaatgggataagcttgcggcctgggtagtggacaacaagttgttctcgcctaatgttcgctggctcattcaagtgcctcgtctctatgatgtgtacaaatcaagcggcatgatggagaactatgaacaagttatcaccaatgtcttccaaccgctgttcgaagtgaccaaagatccttctagtcatcctaaactccacgtcttcctccagcgagtggtgggattcgacagtgtggatgatgaaagtaagcccgagcgccggctgtacagaaagtaccccatcccccgggagtggaacaccaagcagaatccgccttacacttactggttgtatttcatgttcgccaacatcgcttccctcaacaactggcggaaacgccgaggattcaacacgttcgttctacgccctcattgtggagaggcaggcgacccggatcatctggccgtcggcttcctctgctgccacagcatcagtcatggtatcttgctacgcaaggtacccctcctgcaatatctttactatctggatcagatcggcattgccatgtcaccactcagtaacaacgctttgttccttacatacgataagaacccctgcgcgacctttttcaagcgaggactcaatgtgtctttgtctaccgatgatccattgcagtttgcattcacaaaggagcctctcattgaggaatactcagttgcagcgcagatctacaaattcagcgcagtcgacatgtgcgaactcgccaaacattcagtcgaccaaagtggatttgagctttccctcaaagaaagatggctcggcgcgaattgttccctgcctggagtcgctggcaataatgttgcaaagagcaacgtaccagatattcgtgaggcattccgacatgaaacattgctgggagaatggtccttgtaagttgcctatcgtgcctttgacgtcaaagaaatgagactaactgtatatcgtctcatcaggatcgagcgatatgccgacggcaatgggaccggagaacagaagagcttggttccaggtccaccaggggaatcggtgtcctcgaatcatggtaaatctatcttaaggaattaggaattatgcggccgactgactttgaaattcttagatcacaatgcacctaaccctgagccgcaatctgagctaagttcaagtgtagctgacactactgatgcctcactcagtgaggcccatggtacagaccagacaaccaccgctccgtcgactccatcgacatatgtagctcgatcacctcgccttggaacgggtgagttctcgtctcctggcagtggaacaggagtcgggggatcagacggtctgccagaacagaagattttcccaggaatcgttcatgagagggctcgaaaggggactatgcaataggattacacgtgagcggctttacgtgacacatcacagactaaggggagagaacaaaatattggggtaattctaatgcaaattggctcctctatcggtcaagttaagaattcaagtgaccgtgacccggtagtagagtaccacgggcatgctacacatgtaaaatgccgacctctatcaaaaacccaagaacgcctgaagaaacagccacgaattcaacatgcaccacacgcacctcacgcacccgtttatgtcaatcaaacaccaatgcacgcctctcaaccgtaacatacaaattagatgtttcaagtacgtacttcaaatagcccagctgccctttcgttctggcattccccagccttcaggattgggatcttctccagtcataccaggctcctgcctcgcccattcccggatgtatagacggagcgctttccatcgtgcacaggcattcgcaagatcatccttgtctggggctgcaacatagcctttagcatcagttttcaagtcgtcccgacgaagagcctcgacgggaatacccgagattttgctgagttcgtaatcataataacgcgcaagacaagggtaacccagagacaagtaattataaatttgagtcacaaatccatcatgaaattcggactcgatgactttctggagattaggactcgtgggcttccagggactctgatttctgggcgaggttgcgagatgattcagatgtgtatgtgaaggagatgggctgagtcccatgctaatgccagactcatcgatacgaggcatgggggtcacaattccggggaacagaccgtgcccctcccgctcttggccctcgtctttgcaacaagtacccatccaaagaccagaaccctttccgccgtcccgaggaggcgatgcgtaccataagtcaccacagccagcacaaagatcatgtacacgagaaatcgcatcgaggctaaagtggtcacatattgttccctcgggtgaggcgcatcgaggaaggacgatgtccctgccaagcatgggcgggctcttgccattcttattgagttgtgatgaagattttcgttttccagatgcagccatagcccggatcctcatttcagcctcctccttgtggtggcgcatgtagtccagttcccaagacagatccgccgaagattgtcgtcgggacttgacatgatcataattaggcatatgacaatcgccggaatctccactatcttcctcgatggcgaaatgatcaacaggctcgtagacttgctcgttgggaaaggcagccaacgcttgctccttcaactggatatgtgcggattgagcggcaagagagagcaagaattccgaaacctccccattgggagttgcacggagtggcttgcttgtgcataaatctcgtgtaactttatgggaaggcccgggcggggaagtgcacgttgaatgcgatctggagttgtccgaatcttcgctgctgtcagaggggatcgatggaagatccggaactcgaaacgagtgtctgcgagcttgatgtcggcgcagaagattggaagaagaaaactgagattcggatggcagataagtgaggacatgggtatttatatctgaccatgatgttgtgtctggggaaatgattgtatggggtgctggagatcctacggcgttatgccgtttgggaaacgggacaggttcgctctttcgaacggagcgggtctcagtttgtatcaattcgggtttgaatcttcttggagccgttgatgtctgctcagacgacatagagttcctctcatctacctcagaagtcgaataagaccgtctcttactagtcttgcttgtttcaattggctcaggtaaaaatcttctggtcggttgatgtttactagggtcgtttgaatgtgtttctggctttgatggagcgggttgatttactccactcaaagctggctgctggacgttggagcttcgtgatacggtctcgattggctggggtaggaatctccgagggacccttggttgtccttgacattgtgcaagaccagattcttgtggctggtatcgactatccaaagaatttggctggtccccgtgaagagtaatcatatctcgagcgttgtctgtaagttgactcgcctctcttccatcctccgtgggcatgttagatttcccatgtgcttctggtggatggcccattatcttatcctcagtatctcagctctgaaccatgctcgtattgaatcaagatggttgacagagcataaccattttagggggttcaattaaggcacactgggtgtgtgttatcagtgggtttattgacgggcatgcggggtcgaaagagcggtctcgatgtgactagtagagaaacgaaaagaggcgtaacggaatgtaatgtatcagttatcatggatcgatcaaagaggcaaagtaacccgaatatgttcagaatgtacagtgtatcagaaatgcattttgtaaaagaagggaagtgcacatgtgagaagtggaaagttgtggtaaattccatacaaaacagggcacgtgcaagtaagttctcggccgcgggtaccttttatgacatcagctcttccagggttggctgttacgagattaccatacgcgataagggggcgataagataaaagtcatgaatgtcctcttcgatttcttttcctatgtctagtacagcaatggaatccacagacaagcggaagtttgacgagactacagatgattctcaacctggatcggtcgcgaagcagcggaaggtaatcggaccttctctcccgccacctcaggaggccgacgcggcgagtgaaactagcagagatgatgatgatgacgacgacgatgatttcggtccaagccttcctccctccggtccagtgagctctgtgcgacaagagtccacggctcctgatatatctaaatcggcggaaaaggaaaaggaaaaccagcgagatcaatggatgctgcaacctccttcccattccgactggtcttctaaggtcgaccctacacaactacgaagtcgcaagttcaatacaggcaaatcagccacggcatctaaggatctagattcctcgtgggttgagactccagaggagcgaatgaggcgactacaggatgcagtcatgggcgttgctgcttcaaaaaaacagcccggggactacaaaggtccttcaaacgcaaagatgatggaggatcaaatcaagaaatacaaggtaattattgggatatactttcctcggaaatttcatactttattctctccgcgttcttcattttgttctaacatacgtcttgtaggagatgaccgggaagaccactcgcctagaaacccaagctcaggcaccggaagaagaggatgatccaagtgcgcgcgcatttgaccgagagaaggatatggcagttgcttcgaagatatccagcgcgcagcgccgggagatggtcaagaaggcagcagattacaacacacgttttacaaagggcagcttcttatagccatatttcttgtttatagtttgaatacccaagactttaggaaagattacaaaaaaagacaggccgcttatgcggcagaccattttcatcactaaattatgcatatctttcatacggagaacggagaactctgcgatctaatcttcgcccggttatccggctgactcggagtggccaaagtgcgggttgtgtcaaccaatcaacgtcgctgatattcaccttagttatcctcctccctaattcccttaaattccacctctggatattccgttgttcctactcatctgtcgtctgtctttctctcaaccatgtctttctcaaatctggtctccgatattgccttccgtgatgctcgtgtggatgatggcagctcccaaatctcccatgcccgatctcagatgtctcgtgcgaccgctcggtcgtatgccagcaccgcagccacaagcataagcatttctggcgaagtctctagccagctacatgctggctacagtcatcctctgaccagagcatggcaggccgataggcaattaacaaaggtccgccctcaatgatgttatgaaatccataatatgacacacttaatcgcactggcaactcgtcgctaatacattatctctgcaggatatgcttatctatcccttgttcgtcacggacaacccggatgaggagacatcgattccttcgttgcccaatcaacatcgtcgtggaatcaatcgcctggttcctttccttgccccccttgttagaaaggggctgcgctcgataatgctgtttggcgttccgctccacccgtccgccaaagatgcactgggaaccgccgcagatgaccccgatggtcctgtgattaaagccattcgtcttctccgatctcgtttccctcagctttatatcacagccgatgtgtgcctttgcgagtacacatcgcacggtcactgtggtatcctacgagaggatggaaccctcgacaatgggcaatccgttgaccggatttccgatgtagctgttgcctacgcggcagccggagctcactgcgtcgctccatcagacatgaacgacggaagaatccgagcgatcaagctcaagttgattgaagccggtttagcccaccgtgtacttttgatgtcttacagtgccaaattcagcggctgcttatatggaccgttccgcgacgcggctggctcctgcccctcattcggagatcgccggtgctaccagcttcctccgggcggccgcggtcttgcccgacgtgcgatacagagagacatggccgagggtgcagatattatcatggtaaagccagccagcagttaccttgatatcatccgggatgccaaagatttggcacacgatcttccagtggccgcctaccaggtcagtggtgaatttgcaatgattcatgccgctgccaaggccggtgtcttcaatctcaaggacatggccttcgagagcaccgaaggcatattgagagcaggcgccgggatcgtgatcacttatttcgtcccggaattcctcgactggctttagttgtttattcaacttgattttaactgctacatttctccactccaaaagtgcgattttcgggcctcatattttccgtgcgattaccatgactgcatttctacatctgacatctatctatggtgggtctgatgtattgaatatacaatgctacttgaaaactggatagattccccttacgcgatatgatgttttcttttctgtgtgttaacgattaccctttattacaatgttattaatttcttctttttcggtgcaaccggcctcgggatagtgtagcagatgtttgatttccaatcgacattaaaatatgtagcagaatcgagattggattgaggtaaacaggctaaataatgcagaaacattgtgtataaactgcaagatgaccccgattcgccgcacagaacgctaataccatacaaattaaacggaaaccattcgtcagggacagtggatatcgaaatcaaagacaagatcagtaagaaagagacgaaataaataaaatcgaaccggaggaagaaatccatgcgagtcataattttgctctcccacatataggcgtgagtagaccagcaccgtagcgtaaggtaattggacatttatacacaaatcaaaaacacgtcacttcgttcacatagcaaagctgggttttgacccctgaaacatgtaacctgcaatgttcgtgttgacaatctctcccggggcgacgtaaaccccacgagcaagacgaactccggggtagatgatgcagcccgcgcccacatagcaatcttcttcgatgatgacctgacggccttggtaccgactttgcgagcctttgcgctcttgcatgttgggatgagcggttgaactaattattttgacgttggggcctatccacgtatgggcaccgatgcggataacacagtcatccacaaacaggcaattctccgagatcatgacatcttccccgatatgaatattataaccataatggcaactaaacggagcttcgacgacggccccttggccgatagacccggcagagcgaggcgcgttgcttccggctgggggattgacaatggaagatgccgggggtacgatgatctccttcagcaggcggttttgctctttcacactgacgccggtgagcggattgcaggcgttgttgaatttccacagtgcgcctcggcaacgatctctttcctccacgaggtggacgtcaaagggtcggtagagtttgccgttgatcatcttttccttctcggtctcatcgctcgggacggtacggcccgagagctgatgctcgatgctgagtgccatccgagcctgcgcctgcggactatgggtgtccacagttgccgcgggcaatgttcgctgctcattttggaacaagggcatattggatttaggatgagatggatgactgaggtctcgaagtgaggacatgaccggatagtcaggtttgggacgtccctcccgcgatagctcatggatgggtgggacttcccggtaatcgacgacttttgctatggattcggatggataagcggggagaccggcattggacccggaccccgggccggcgcctggccaagcttgttttgaccacgcatggttggatggtgtatgcgttgggctggtgttgtattgttgaacagggcggtcattatcctccaccactagaggcctgattttggtcgcgtcgacatgttccactaagttgggttgtcgctcttgctgtcggggtacttcttgcatatacaagccattgatgtctgaatagccttctttggattgcaaagggatcggggtttttgtactagatggcttttgccaggtgcttcgggatgaatagccttcacacaggaagccgccacgaagacagttgttgcctacaatgcatcattaatgtcgctctttcggtagaatttggacagggaataatttgtacagaaaagaacgtgggaattagagccattaggagttgacttacatgccggatgttgctcgtcgcatttcttttttctgcgacggcaggtcatacagcccgtcttcgttcggttactaaatacccgcttcctctttggagccacctgcattgccccatgtcgatctggtgcataactaggagaggatggctgctgagcgcccggggtcgagcgatttgtcatagatctttcctgacctgtctcgcgttgaagagcgtctgctaggtgggcatccgatgcatccatttgctgggcccgttgggcctgggtgatcagctgagaatcatattctgaccaaggactattggcggaggtctggcccgcatcattgccctcggaccggtgagatggggttgccgaatgattaccacgctccatctccgaggtcgatcctggcacgctgccattcggattggtttggttgctctcggcaggacgggtcaccggactcctggaggcgttcacggaatctcgtcctcgggactctgatctctttctcttattcttgttgtgagagccactgggggaagatctttgtgaccacttctcttggtcattggcaggatcatcccggtcatcgcggtgactaggatctgaggtggtcttttcttgggtcggcgcacgttctccattggggacggaactgggaggtggaccattcccatttccatttccatttccattttcattcccatttgcattgacaggagccaccgtttctctgccattaactgcagtaaatcgggatgggctgtgttccgtccccgtttcggccccagagtcgtgagtaccagtcatgacggatgcagcaagagccgtcattgtataagccaagaaccagaaaggagaaacccgagaccacgaagaacagggctgaggttacaccgagaggtgtaagaaactattcaagtaaagggcggatataggcaagagttgtagctcaattgccaagcaatcgcccccaaatatgagggatagtctcaacacgcagagacccaaagctttcaaggttcctcaaatacttccaatatcttaatcaacagctctgtgttggggttgtttgcgcggaattgcaagttaagtcacccgcgggtggggcgaggagatcgggagattatcagagatagtatacaagatgggttgaaaaaaagagcattcaaccaagtggctttttttaatagaaagagagataaaagaaaggatatcaatgagaaagaagtagccaagggctcaaatatatagagtagacagagagagagagataggtagagagagagaaagccaaaggtgaaggaagagacggaaaatgggggagacgagggaggggggaaagagactaataaaagagaatggggaaaacaccgagctaggaccctctcactctctcactctctctctctctctggcaagaaaagtacaaataaataataaataataaaaaagagtaatctccaataacttgacagcaaaaaagagggaaaggggaagttggcgcgcgatcggcaatgacggcgtcacacgcagcaccaatcggagaagcgatcagccgtgtcctagtgaggcgcgggtctgagacatggcccatccgctttggactcttttctgcgcgcgttcccagtctcttcccctctccgatttcttttttgcccacattcgccattgccgcccgtgtacgcggtgtcccgcgtataagggcggttatgcgcttagggagacgtcgacttttggtgccttttttgagatggatttaatggcaccgtggtattgaattttcgccttgaaataatattctgttccttccccctaattcttcccaacacccgagtttttcaaggacctggcgcccatctcgggaattattgatgactgcagcgtgccgcggcgctaggaccaaatcactagaggagtcggctgagcacggatacctcatgggcgctttgagtgagtttacttttctttgttttaatcccaacttcatattctggacggcgtacggggtatactttcatctattattataccgattcgcagcatacggagtatacggagtatatgggatatgtctatagatattatacattaggtgtgtataaattgttggcacctgattcagcccaactctcagaatcccatcactatcactatcacttttcgcataaaagcacctgtcataaatataaaaaataataaatatccaatgtgatatcagtgcagtgtacagtcgttggccggtgattatactgggtaaatgatccctgggcggtatccccgggcggtgggggatcgcatgctgactaagatctcaacagagggatcaagttcaaacatccaacgcgctctcaccgccagagtctacgatagcttccttttttgacccccaattttcctgcctgttttttttactgccttcagagtctggtaagtcttgacctggattcacctcctctagtcccccgtccaatcatttctcatcctgacatcgtgctgatcccccaacccctccaaaggatctctaccccaccgaacacacttgcttcttattcccctctatcatttgatactgccctgcagccgccctggcaataccataacctgtccaggcggttcccatcatcctcccctcttgactctcgtgtctcaaaccctattccgtcatcagaggcgatatcgccagtctgcgccgagatgtcgatttcggtacaagagctggacaacacggtccgagctttgtttgaaggcaaaggtgccgtggtaagtcgaacctgtctcctctacacggcttgggtcgcagaattcatggaatctgtgtatcctccgtggagctctggggacaccaacactgacattgagaaccgtctagcaaaaccaagcacagcagactttgacagaagtaagcgcatagcccctccacaacgtcatatgaattgaacactaataatccctgtgctattagttcaagcaaaatcccgatgcctgggtcaccgtgggcaacatcctccaagaggcttcataccttcaaaccaaatgtgtgtcttgagtctttggcaatctcccttgtgcctggaaatgcctgggaaacacttgctgattttcacagacattgctctccaagtcttagacaatgtgattatgacccgatggaaggttctaccaagagaccaatgtcagggtaagaactacatgcattgacctcgtcgttttacctccccatactaagaacgttcttcataggtatccgcaattttattgtgcgattcattctcgaaaactccgaatccgaagagaagatccaagcggagcgccctctgttgaacaagctcaatctcgttcttgtctccattttgaagcaagaatggccgcacaactggcccaccttcatcaatgagattatttcctcttgccatgccagcctttcgatctgtgaaaacaacatgacaattctccgtctgttgtcggaagaagtcttcgatttctcgcaagaccaaatgacctctgccaaggcacggaacttaaagacctctatgacctcggaatttgcatcgatcttccaattgtgctccgaggttctcagcactgccaaccagcccagtctggtgaaagcgaccctcgaaactctccttcgatttctgaactggatcccgttgggctacattttcgaaacccccatcatcaataccctcctcacccgattcctaggagaacccgagttccgaaatgtgactttgaagtgtctgactgagattggtggcttgcaaattggcgctccttacaactatgacgaacgattggtgcacatgttcaccgagaccctgaccaccgtttccaatgtcattcctctgtccttggacctgaagcagacgtatgccatgagcaatggacgagaccaagagtttgtatcaaacttggccttgttcctctcgagctttttcagtgctcaccttgatgtatgctcccttttcctttaaccatgtttttttagtctgtttgatgctaaccttttccttcttttatagcttatcgaaaagttgcctaatcaagattacctcacgcacgcacatttctatctgattcgggtcagccagatcgacgatcgggaggtgttcaagatttgcttggactactggacaagactcgtgcaggaactttacgaagagatgcagcagctcccaatcaccgacatcaacccgctggtctctatgagcgttagtggtttggcgaacggtggtgcccccaatcctacgaccctagcgaactacccattgcgcaagcacaagtacgagactgtgttaacaaaccttcgcaccgtgatgatcgagaagatggtccgcccagaggaggtcttggttgtggaaaacgatgagggtgaaattgtgcgcgagttcgttaaggagagtgataccatccaactttacaagacgatacgcgagtgcttggtctacctgacccatcttgatgtggtcgatacggagactatcatggtggataaattggctaagcaagttgatggaaccgaatggtcttgggtgaactgcaacacgctatgctgggctattggttcgatctctggagccatgaacgaggaaaccgagaaacgtttcctggttaccgtaatcaaggatttgcttggcctcacagagcagaagcgcgggaaggacaacaaagctgtggtggcgagtaacatcatgtacatcgtgggacaatacccccggttcttgaaggctcactggaagttcctgaagacggtcgtcaacaagttgttcgagtttatgcacgagacgcacgaaggtgtccaggatatggcttgcgatacgttcatcaagattgccaacaagtgcagacgccatttcgtggcacttcaacctggtgaaagtgaacctttcatcgaagaaattgtacggaacatgaggaagatcaccatggacctttccccgcaacagattcataccttctacgaagcttgtggctacatgatttcggctcaaggtcaaaagggtctccaagaccgattgactgaaaacttgatggcgctccctaacaccgcctgggatcagattatcgcggaggcaaaccaaaacccggcgattctccaagacgccaacaccatcaagattgtcggaaacatcatgaagactaatgtcgcagcttgctcctcgattgggacctacttttattctcaaattggtcggatctatcacgacatgttgaatatgtaccgtgctgccagtcagctgattaatgatgctgttgcaagtgatggtaactaatccaattcacgctgacggacaccgaatttcttactgacacaaaaataggagctattgcacccaaaacccccaaggtccgaggacttcggaccatcaagaaagagatcttgaagctcattgacacctacgtggacaagtcagatgaccttgagatggtcaatgccagcatggtaccgccgctcatggaggctgtactgatcgattatgcccggaacgtccccgatgcacgcgaggctgaggtcttgaatgccatgactacgatcatccacaaacttcacgtatgtttttcgccctgctgattattggtgcccttatttgatagcctgctaacatgtcaatcagaatctgatggaggataagattccagccatcatggacagcgttttcaactgcactcttgagatgatcaacaaggacttccacgaatatcctgagcaccgggtcgagttcttcaaattgcttcaagctgtcaacctgtactgcttccaagcacttctgaagctcgatgctgcgcagttcaagtttgtcattgattcatgcatgtgggcgtcgaagcatgacaaccgcgaggtggagaacactggccttacgatgtgtttggagctgatgaacaacatggccgaaactgaccagcaaacctcgagcattttcttccgcgagttttacattccaattcttcaggatgtcttctttgtcctcacggatagtgaccacaaggctggtaagtaatgtcctttgtccggatatgaagcaagaagctaacaatccgattttttaggattcaaatcccaggccatgcttttgtcgcgcatgttctactttgtggaatcaggcaaaatccagcagcctatctactcccccgagcaagccccgcctggaacttcaaacaaagaatttttgcaggagcacatcgcaaatctgctacacaatgcattcggcaatctccaagagtaagctccctcggcgtcggttgaaaccatgcaagagtatactaactttctccaccagagcacaaatcaagcagtttgttattgggctgtttttatacactgatgacctaaacaaattcaagactcaccttcgtgatttcttgatttctctgaaagagttttccgatgacaacgcggagctgtatgcggaagaacgagaacaggcggtgcgtgatgcccaggttgccgagcgtgaccgagctatgaaggtcggagggctgttgaagccatcggagatggatcaggaggatgagctatgactggacgaagaactgcgtaccgaatttgttgttgcctctactggttcccctgggcatgagcaagaatcaaggttgacctctcagaacgacagccttgacggctggtccttctacgagctctagctcatgggaagttatgtgccgctacaacaaaggaagcattgctctggaaagatgtgtgtgaatctattcttttatcttttctttttatcccccttggttggctatcgggcatgcgagagaccccttccctgtctgagcgggttctttgaggttggtgcatcaacacggaacggatttacccattttgtcctacgtgttctctgcctattcaggcgcgagcttgtttgatagcttttaacgttaaatgattaaaaaaaatctccaatcaaaagatacaagaataattggccgcttgtggccttgtcatctctttatggtagttagagtttgtttaggtatcttccttctctgatctatagctagacgatgaaaaaggcgaaaatgactgtaaaccgtacagacatttctagtataagccgggacatactggaaccgtcgcttcctacgcgacatatcgtacgttaatgtggggagatcggaaggcggtgaatccttatcagttgcatcatcagaaaaagtagcccccgggccgccttcgcggtgattctattctacgattctttgattccttgactctctaagccacatcactctattccatccccatcacaatgtctcgaacacgccagccaattgcttcaaattcattccaaaccacgacagagtcctcagactcctcaacagcccacttccccccaaccctcaggctacgagccgaggaagcaactgacaccagcgaagcaacatcgtcatcccggcgaatccgatggagcgaagatgtcatagacaacgagggcatgggcaaaaagagctcaaaaggtaaggatatcatacatctacatctattccatctacccgcaatgactccccaaaaccaccagcaacaatctaaccgccaccagtatgctgcatctaccacaaagcccgcccagtgggagaaagtagctcagaagagtcctcatccagctcatccgaaagcgagagcgagagtgaagacgaccgtcgcactgccagagtcaaccgggctcgccgcgcacacccacactccggagaccgggaaccgcacgacgagcacgaagggtgttgtcctgaggaccacggctcaaaaccgaaacgcagtcgcaggaagccgagtccgaatgcatacgagaagatgcctaagccgtcgaagagccagagtcagaatcagaatgagaaccaggcgcggggtacttgatctttattttatgggggggtggctttttgattggcaaggaaatgcaatgcgtgataaggcggaactgggaaatgcctggggattcttggttgggtttggtttgggtgcccgatgcacggccagacgaatcatctagggttgtatttcgccatgtctatgcgcggtgtgtatgacatttgcacgacgctgggacggagacaccccatccggtcggtggcatgcaggaaaatgtacaatggcatgatcgaagagtcaagggaggacatgccgaatccatttccggcgcgccgcattgggcgtggcgggtgaatggtcactgcaagaactacttggtctacttgaaacagatagagggaattgggtagacaagttaatgaaatttgtattaagaagatgtggaacgcagtgagggggtatctgaaacatagctgcagcccggtccgggctataatgattgtactccgtacataggcaaaggataaagaaatcctgttccgaaacgctaaagtggactttataccatcatgctttttctccttgcagcaacacgctggccacgtctgacatcgctgtccattgtagaaccgtttggccccggtccaaatgagtcttcatcttctggagagtcgccgtttggggattgtggttcaccctggtccgtgtcgtattgtgccatgtctgcagttgtatttttggggtttgacgagtgacgtcgaggctgacgcctcgaattcaatggtttttgtgatacttgggccgagatatctgcgaggctatcctcaatctctttcttgaggccagagcttggtttccccacatcggggtcgtcctttggggctgacgacgccttgcgttttctccgggagaccattgctagcaactgatctgaggattcatccacggtaaacagatctgagctctgcgccgcaagagtgaaatcagcagggagagtaccatgagactgggtgttgccgccctctccgtccaaactttcccggcctgcctggaaactggaggatcttcgcgatccaagtgcaacagcatcgatcatttccttcgtagggcggcgcatcttgtcccgtaggttaggctctgcatagctaaccacagcaccacgacgtcgtgaatgccgagtggcagactcttcctccgtcttcattgtattcggatgcggtgactgttctggctggcgtgaggcaggctcttccacctggggaggagcagggcgagcgcgcttttctttgtttgaagaggcgcttctggacactcgcggcttttgattgacagtgttaccactgagtttgtcgacattcttaactttctgtggcgagttgctattctcgtcgcccttggtgggcctttgcataagcttagagtcctggtacgaagacatgcgggccttcttcggagagcctagattggaatttgcactctctgttctaattgttagctacactcattgtagagatgagaaagtagaacatacttggctcgaggaccctccgcatagatagaacgggggttcttgatcctcttgttagtttgacatggctttgagtgggtgactggtctcgctgtgtatcttcgaatgggatcgtttgcttttttggggtatggctgggccgggtgaattggaattcgtcgtcgtcgacatcaaggttggaagtgaacctgtcatcgtcttcgggtacgtattttcgcttcgttgaaaccgatgttgtgtgctgtgttgtatcgatgggtggacttggttgccgatctgttggcggggggctaatttcaggcgcaacgatcgaactcgacctctttttcttcttgcgtgtctcgagagttggaggaaatgatggctcgggttcttcgggtatatcgttgtttatttcggtcctgaatgttgattctggtggtgatgggcttgaattttcgatgagtgcatccccttcctccggcataaagctgaatcgaggaggggagtctagaatactttggtcgtcttggagcaggctgtcaagctcttggggcctgaataagatgttagcaatttggaatgacccaaaatctcgaagattcttactccagagtccgtcgagggtaatatttgtcctcaacaatggcaggaagccttccatcttcgccttccatgtcttctgtcctaggtctcgactctgccgcctgttttggtctatcgaactgtgtgtcgcagagcttgcccaccttgcggggtaatgagcccaaatctgcggccaaattgctcaactcggctagtttggcatctagcttggatttgatgtcgtatattccattgtgcaacattttccccgcttccagtcgttcggtttcccgggtaagattgatgacctgttttcgaagcgacacattttccgaaattagatgtgatacttctgactctaggctgcgaatacgaagagattgcaaggaattcactctcgcgatctcccgattttgtcgcacaaatcgtcgcttcactggatagaaaacaaggaggccatatgtcaactgctagctcaaattttgtagtatagtagtaaattgcacgacttacacgcttcaatggactcagcaggagccgcatagtcattcaaccgagccatggcctaggctggaggggatagcgaccaccgcgtaatcagacggattgagagacaatcctggtgtgcagatggaatgaacttgaatttgatatcgagtccacagagtacacaccaggaaatgacgtgtgttggggcgagtcgtgagtacggggatacgaagagagacgagaaggtaaacagcgacgaatgccaagcccttgttgacgtttgtccgcatttggtttagcttgcccgttcagtgtttggatgactcagcgcccctcccagcctggagccggggtcatttaggcagcttactttgtagagttatccaacagccctagaggtacagactttgacagatcgcgttcttcacacctcgtactgttttgtcgttccgctcgctacacatctcccacaatggcatactcctcacggccaagctcaatgcttccaggcgctccaggtggctcatctatgcgccagcccggtggttcgcaatcgcagcaatcttcggcactgtcggcccgcattgcagccaaaaaagccgagctggagaacctgcgagagttacgcgatctgagtggaaccttggcgattcagatgcaagctttggataataagatctccacgttgaaagatggcaccgaaggttggcctatctgtttctattcgaagggctgatcgctaactacctgttttaagctgttgcgtacgtgctttccaactgggataatgttctcagggccatcactctggcttcgagtaagcgctattttcttacattggaattctacaactggtactgattttatcctgtaataggcaaagcaggcggactctacgaacccgagtcggatagtaagaatgtggaaaaacgaaacgatcctcgcctgccatccacgctggttcgcattccagccgagccacgtgataagactggcgagtgaatcagtcccttcgacttcagccacccggctgaagcaccctggatgatatcatcttttgcggcacacccggattatttgtggctgaaagtttgataggtaccccgtgggttcgcgatattctccggttatcttcgcgctcatgtgtatcaggctacgtaggacggcgtacagaatcggcgattgcctttgagaatgcactcggacctacttggctcctgtcacagccaatgagcggccttgccctcgaaaaaaaacactatcagaagaggcgagttcatggaggcccaatcatgggacttctcgtcatctgtcgcagaaagcgcgatttaactgagaatccacgagaatccgtttctcgcgtgaccagctatgcagagtttggcgcatgcaataaagattgttatctcgaaatggcagacaaatcagaagacagggattaaggagatcatttatttttccccctcagtttagttccttttgaaacttctgcactactgcaaagatcatcattggtaccggaatagatgcacagcagggaagatgaatggacgatgatgtgattggcgggtagagggtagctcaccatgtaccctgcgtactatccaaggggatagttacaagttaatagagtctaagtttttcttccggcatcatgagacgggacgcagagctaatggcgctatgatgccgatccgcagaaaagtcttattaccagttcgaggttcctgcagattttaggggcaaaaaaggcgaacagactctctagcgtgtgttttagtgtctctctagtggctagttaggggcctacacaggtacgtctccggagtggttatcacgtatttcaggccattggtacctgagggggtacttggggcagaagtacctacttatcggttgattgctggatagctgatagaactatataacgttataagaagtgcgatacctagatatcaagtacccccatccgtatcctgcgtatcatcttccaaggttcttttccttaagcgccccaagcacgactaaaatccaagccccctcttttccctgagcacaacgtgcccttcggattcgacatgcgcgattatctttccccgcaatagccgtgtggcttttgcactttggccgctgcatgtatttatatcgatttgtctttcctcattccattgcgtggtatggcatgatcgctgtgtgacacttcaacaatgtcaagtttgatgaggtgatctttaggcttctttacatcttacctttcttacttccggacttttgagctttgatctttccattctcttctatatacaatcctcattatcctcactatctctaaatctaaatctctcaatcttgcaaccttgcaaccttcaacgttacaacattaccatacaacattacatccaacttcaatttcttgctttacctacctcaacccgagaacatacatatacaaccatgtccactgaatggtctttggacttctgccttgtctgtgaccgtcagaccttgggcgctccttactgctctcaaacgtgccgcctagccgaactggatgagacatccgatggaatgtcacgaagatcgagcgcatcgtctacacattggtctgagatcaaccaggcccaagctcaagtcgaggccgtcaatgcccacccccttcgaaagctatctgcctcctcctctcaaacctcactctcttcgctcaagagcaacacccccaattctcccaattcccccaatgtggccgatcggctccaggatgaattgcgtgattatgcatcttgcttcgaccaagtccgcgacctgaaacggcgcatgaccaccacataatttcaatttcaattcgaacccaaactcaaactcgaaaactgggcttctcgagcccatcctcccacatctggtggtgccgagggtacccaaatgcatgcagccctcatgctgcttttctgctttctgctttctgctttctgctttctgctttctgctttctgctttctgcttttgatcatttgcatacacggaaaagaggcgttgtttgaaaatatacattattgcgtctatgtttacggttgttctttctgtttttgtggatcagccttcccacttggtctttctcacgaacctatacccccccaattgttatatatatcatgatcatcggaaggagttgaatccaggctcaggtgcctcacctaattagttatctaccagactgcctataatcaaattggaattatggttgatatttttaagaaaaaacatcttgatgtctttagtaggtctctaccaaagcccaattcgtatcccccattgggtaggttaagtgcgtcatgtcaatttcccacgtcagtcaatgtggggaccctgaggaatgtacccgatgttaaccgtccaaccggggaatgctagatatatcaattagaaccactcctcgacccatcgacaacacaccaaatctgtatggagccagcaattcgagatgcaagcgcaagcacaagctctagcccaggaccgccatataccctttgaacatcccacggccggattcggctctgtgcagaagcaaatgccttcccgcccaacttgctagatacattcactgcgcaagagccttcaacagcgccttttcatccttcggcacaaatcgaaccttgtacttttgaggaatagccaccaaactagtcggatctgagttaccccgaagaggatgacagtctgttttatcatgagattccagacggaagctgttcaaggtccggatgaagacgaggtagagctcgcgattggctagcagcgaaccggcgcacattcgatagcccataccgtacgtaaaaagaggtgcgtcgggctgctcgagccagcgctcgggacggaactcatccgggtcagtccacacgtcggggtctatgaaggattagatgtgttggatctattgccagatggatatcaagttcgactcacccatgttgcatgcccaggcattcaagaagaagaccgtgcccttgggaatggtgattcccttgtaggtgatatccttgatggaggtgcgaggaagtgctaatcgcagcacagtgaagtatctcaggtatatggttagttcaaggactattcatagctcatggcagcgatacaaccggggacataccgaaggcattccttgaccagagctgcaatatacatacacttctgatcatcgtcagaagaacacatgggatcatcctcgccatacatctcctggattgccctggccgcccgatcctggatatcaggacgctgagccagcaagcccagactccacgcaaccaaagtggtgacagtatcaagaccacccgaaagcatggtcaagctaatcgacgtcaactcctcactgttcagcttcgcctctttatccagaataacattagcctggatacaaggcttatgtgtcccctttgccatgcgctcatccaaatcactattcagcgcaccgaggtacttatcacgacggattctcatctcggcggctttcttcgaattggaactaaaggggttcaaccgcagaagcgggacataatcctgcaggtttccggtggtgcttcggaaccgactgatctcttcttccacctcggtgatctcatcgaacaggtcctcttcctgcgaggcgatgcgcacgccccagttcagagtcaacgccaaactcaagctcagacgctggatcatgggcatcgggtcgacgggtgtcttcccgtggtttccgtatcggtacagctcttccacgaaggactttgactcgacatccaagtgtgtcacgtacatgtcgacagaggggcggttgagggcagatgcagcgccctttctacgtcttttcagggactcactatagggcgaggtaccgatagtcgttccggcagtattggaaacaatctagtcaagtatggtaagtttcagttacaaaaggcacaactcctataatcaccttatggaaagtataagtctcaggcctagagctcaaagcctgtgcattctgaccgaaaagcacctttgccgatgcagcagagttgaccacgacgacggggatgttccccagctggatctgataaacggcaccgtgcgttttcgaccagaggcgatactgctccgcggcattggtgcggatctgcgccaagtttccaatcaatggcaatccgcgaggacctttcatacccttaacgcgggcggaatcacgaatgaactcattgagaatgacatagaggacggggacgaggaggacagcggcggctagcgagtggtacggatactcaatcacgctgccttgtagcgatgccaggacagcggcgatagccatggtgctggtgctggtgctagatgggatagaatctgtcttggaggtctgtagaaatcatgaacatattgtgaaacgtaaccctaggctacgggatatataagtagggtgtcataggcctaagcgtcgaggcttccattgaatggaacatttccgtgttgtcagggtcgttcaagccgtgatcgtaacctagtgctttcttaccccacattaccccaggtcttccaagtcgtgtcccgccagtctatgcactgcggcgatgtgctcaaccgagggcattccgcactccggaattcttccgcttgacggggttgaaggtataatttgtactgcgttgatctaagtggaccaaatgtgcggagtatgttaactagttatagttacatcttctactttatttggttgtttgagtcggtgatttcatgtgtttttagggttcgcgtcgctcttctatggtattttgcttcttttatatatttctcaatttgatggtctttcaagccttggcatttgtgttgaatatgacatataacataaactgggtttaggtagatcgtggtataatgcccctatttgagatatccaccagcaacagaaggatctctttgccaaattaggttttaaggggtgctttttcctaagaattagggaatccttctgtcagattttgaataactacacagcacttatgattttttatagtacgggtatgatatcatgggataccattgtcgcataagggactagtgaagatcatatccactcgcgcaaggactcccttctctttttttaaacaccttctagaaagaagagcctcaattggtaagaatgatttcacaaccgaagattccatggtggggctactgcatatcttggaagaaagatgacatttttgaccaaaaccggaatccaacctgcagggattggcagtggggccaaggataagaacaaggataaagatatgtatgcacagggggaattgagcaatcccagcaagtggagtagatccaaacaaggtgttcataacggggggcccctgggctccgtgggccggatggggcaaggcaagatggctgtctgtgactgggtggatgtccatggagctctcagtcaggtggccacgaagagattgatcaaggtccagacccattgagacagatctgcagtcccgggcatcaacaatgaaatgtagaatcggcttcccgacgcggttggtatcatattgattgtcgtccttggggttaggattgagcgcaagttggaagctgtccaggtggaattcgggaaatttcttcgcgtcatgtgtcgtcgaaaaccggacggagttcccgagccaattggtgtggaaatgaggaaagaagaggtaggtatagcccaatccccactgtcgcgctgctccaatggtgagctgtcctgctgccatgacgcagagctttgttgtactcgtgacacccctgtattcatagtggaaggtgtagcgatcaagtattcgatactctgtaccttggagattgtcgcaaatcttgcctttcatagaggtgctgttgttgacaggtttattatatcaagttcgtccaaaaaaaaaaaaagagggaattctcatagctgtggtcttttctcccgcccttcgcctctccccttcagttcttcctctcccacttctcttcctctcctcccccccccaatcttctcctctattcctccgatctccctcttccggcgcttattcttgtaaagcaagtatcccggatatttgaacatttgaccacattacatcaccgtacatcggaataatcgcagataatggccgctcggcactcgcgcaagtttttgcgacctctcctctacacatcggcggccgccgccgccggaggagggggtnnnnnnnnnnnnnnnnnnnnnnnnnnnnnnnnnnnnnnnnnnnnnnnnnnnnnnnnnnnnnnnnnnnnnnnnnnnnnnnnnnnnnnnnnnnnnnnnnnnnnnnnnnnnnnnnnnnnnnnnnnnnnnnnnnnnnnnnnnnnnnnnnnnnnnnnnnnnnnnnnnnnnnnnnnnnnnnnnnnnnnnnnnnnnnncgggcgccgccgcaggagcaggtgttatctacatttcttaccgtccgcgaaatattccaggcctcgaagcccctgccgttcctccgccaggttactacaaaggcaagctggtcccgcccagtttcccttccatcaagtctcgcctcgaacagattgaggacctcaagcgcagtgaggaggaggaggaatatgatctgcttgtcattggtgccggagccactggagccggtatcgcattagatgccgccacacgaggcctgaaggtcgcggtggtggagagagatgatttcagttcgggtactagtagtaagagtaccaagctggtacacggtggtgtccgttaccttgaaaaggccgtgtgggagttggactacaaccagtgagattgtcctttcttcctcggaaagagatgaggtcggaatgaccgcatccccgcgcatcccttctaacaatcgcatcgcagatatgcgctagtcaaggaggctctcagagagcgcaagtacttcctaaacacagctccccatctgtcatcatggctgccaatcatggtgcctgttcagaaatggtggcaggctccgtatttctgggctggcaccaaggcctatgacttcttggctggttccgagggcattgagacctcgtacttcctcaccaagagtaaggccattgatgcgttccccatgctgaagcgtgacaacatcattggagcaatggtgtactatggtgagtagccaacacggaccccgcaaatgatctaggctaattcccgatcagatggtgctcacaacgactcccgcatgaacgtctccctcgctatgaccgctgcgctctacggtaccactgtcgtgaaccacttggaggtcaccggactgaacaaggatgcatccggcaggctgtgcggtgcgcgcgccaaggacatcgtcgcagagaagaacggcgaggtcgccaaggagttcaacattcgcgccaagggtgtcatcaacgccactggtcccttctctgattccatccgcaagatggatgagcccaatgtcaaggagattgtggcccccagtgctggtgttcacatcatcctgcccggttacttcagcccctcaaacatgggtctcattgacccttccacctcggatggacgtgtgattttcttcctgccgtggcagggtaacaccatcgccggtaccactgaccagccctgtgagattgaggctcagccccagcccactgagaaggatataaactggattctttcggagattcgtggctacatcgcccccgatatcaccgtcgaccgaagcgacgtccttgctgcctggtctggcatccgtcccttggtgcgcgatcccaaggtgaagaactcggaggctctcgtccgcaaccacctggtgaccgtctctcagtctggactgttgacttgcgccggtggtaagtggactacttaccgccagatggccgaggaggccgtggacgaggcagtcaaatcgttcaagctcaagccccgccagctcaacagccttcccgacatcagtggtgtcggaggcagtggtctggttgctgacggtgccgttctcgacggtagctgccagacccaccaggtgcgcctcattggtgcccacggttactccaagaccctcttcatcaaccttatccagcacttcggtctcgagaccgatgtggccaagcacctcaccgagtcgtacggtgatcgctcatggcaggtcgctgccttgtcttcccctaccagcgaacgtttccccgtgcgcggctgccgtatctcccctatgtaccccttcgttgatggtgagattcgctacgccgttcgtcacgagtatgcccagactgccgtcgacgtgattgcccgtcgcactcgtctggctttcctgaacgccgaggccgcccttgaatccctccccactgtgattgacacaatggccgaggagttgaagtggaccaacgcccgtaaggatctcgagtggaaggattccttgactttcctttcatccatgggtctgcctaagagcttcatgggcctgtcgcgtcatgatgtccagaatggccgtgttacgcaggttgatgatgccgagcgtgcgactttctcccgtaaaggtatgtttgtaacaaacatttcgatgaaccacagtgctgaccattctagaaccccccgcggatatgattgagagtgacgttcgtgctactattgaaccccctgccgcaacacccgcgctcggctagacgtgtggcatatatagaccggcttgtataaatagaagcgttccttttttttgttccaatattgacactatttaaccagggactttggaaaaagaccctcaatccaagaccttaagatgacgctttccaaaaacacgcgcattcacattcggaaagtgccaccctgagcatgctcgtagtttcaatttcttcaatttcttcaattccctcatttctctccatttctctatatcttgtccacactcacacaccatgaataccagtcagtctgatattgacctccagtcgctgcgctctgtgaagcgcaagttggacccggagaacgattctgttgtaccaaagccagatctggaggagtccgatccctttggagacgaaagccaatctggcgtgaagtacaagaccatggcgtggtggtaagtgtttccttttccacaggcaggatgaagctcatcctttcaataggcaagccggcatgagtaagtcaatgtcttgcatattgcccagctttctctaacaaaccggtcagtcatgatcgcagaaaccatctcgcttggtattctcgcgctgcccaaagcgcttgctgttctaggtcttgttccgtacattctcctacccgctggctgcaaaggccgatgagctaacctgtttgttcagcggcatcctaaccatcctcggggttgggatcatctcgacgtataccgcatataccatcgggcgattcaaatgccgccatgtccaagtgcacagtatggctgatgctggtgatcttctgatgggaagggttggacggactacactggatgtggcccagctcgtcttttttgtgttggtcatgggaagccatatcctcactttttccatcatgatgaacgttctcaccgaacattcttcctgcaccatcgtattttcggttgtcggtctactcgcctcgttcatgttgacccttccacggcgacttgagaggctttctcacatctcctccgtgagctttgtgagtatcgtcggagcggttcttactggtatgattggagtcacccttgtcaaacaaggcccagtggaggtcccagctttttcgcctccgcccaaagtgcatgatgcgtgccttgctattgcaaacataatatttgcgtacgcaggacatgttgcattctttacccttttctccgagctcaaagagctcaaggacttcccaaaggctctggcgcttttgcagatgagtgaaatggtcttgtacacagtggcttctattatgatatatgcctatgttgggccaactgtcaactcacctgctctcaattcttcgggacaattgtttcgcaagatttcctatgcaatcgcactacctacggtacgtatctttttccgtgtacttcttttggatatgagcttaaccaatgcacagatcctgatcgggggtgtggtgaacgcccatgttgccgtcaagttcatttacgttcgtgtcttccgggggaccaactcgatgcatacccagtcatttagggcgcgggtagtttggactgttacatgtgcggggctttggatcttgtcgtggatcatcgccgaggcaataccggttttcaacgatgtactagggcttgcggtgtgtactacctgtccctgaccccacctgcagcgagtactaatcattccaaccagagttccttatttgctagctggttttcattcggtctacctgggctattctggctctatctgaaccgaacttgttggtacatgacctggcgacagagggcattgtttggcttcaatctttttctggtgtttcttggatttgtcattgtaagttgagctctactgtggtttgaagggtcgagttaacctacgccaccagtgcattgtcgggttgtactcgtctattcggtcgatctttaacaaccttcgcgagggtgtcggaggaggtagcttctcatgtgccgacaattccctctattgaggcagtcttacgacaaagaaaatgatttggatgggggtgggtaggttaggtttggaaatgggcaattacactcgggtcacagcattaacgaagcacgaagaacatacgacgcagagaactatccagctacatgtatagaataaattgagttctcttgcacagtttcacagatgtaggcgatatgcaaggagccgagattttgcggctgctacccttcaacggctaagtggcatgtgttagatctcacaggggatccttgtcctcccgatcggatcaaaggcagtttcaggatttcagggaagacaaatgacatcttttatgcaggagatagcataactatccatccagctgtccttttcggagaatcaggccatacctaaagttagagatagcacggtgtactccgtagttagctggttgctatatttcctcggccgggaggtgtacatcacgtgatcggtttcgaatcatttagggtttacgtcacgttgttatataactccaactaacattgtcgtgtttatctattccggccttgcagcccagatcatccgatgaaaagccgaggctgtccaggggcgtactccatccagcacacaaaacgagagttaaggatcaaaataggggggggggcaaatgggaaattgccagacatcttacggagtatgcggagtatgtatgtggataatgatacctaatagacattaacagtactgcgtacgtggcccataaaagctagttagttaatgaatgactcgcatatggtaaccccctgggagttagtgggctcggggaattggctgcagctactccgtccgtactccgttgttaggtcccgaggtcgcatacccgttggtatgtaacaccatctcggactagattgatatgttaattatgttagtgttagtatcgtgtttcgagaagaatagagagaattaaataatgccaacgcaaaataaaagcagaaccaagaatttaaatcaaaagtcaaagaagcggggatatatagcagaccccgtagccaaagtaacaatagctactccgtactccgtaagctacagctgaaataatatccacttcctgacgtctgataaatgattcttattaactaaattatatttttagcccaagtgctgctcccatatattgggttcccctcttttttttttgcgtagaagcccgacgtatgtattgtgtcccaatcaagacagggatcagggccccatacttattccctgtacagcaaaggccccgaagggtgcagaggaaaagtggaaacagaacaacggcaaggcatacatgcatgccatcatcacaccatttccccgaggattggggaaggaagggcgtgaccaggaaaaccggtccttcgatttgctggatttgctgtgtatcgaaatcacatggattcgatccaatgatctccccaaggcaaatcccaactccaccgcttcttgtcttgcacgcaatgtagatcaaccttgttgatctccgtgcagatgtcgcatgggaaggaaatgaagcggtatatcccggcgggatctgattctggttctggctgtaggctctggtcgactcgaagctggaacgtgccgtggggcaccagtactatgcgaggagaatgcgacggaggggagtaacgggtctcgtgatgtgggacattgggcaccttcgaacctacacccgcactcgtctcgctgtaccgcgcaagttctagagacatcatgcagaacctcggagaaggatatggaagaccctcttggctagtgctagcatcgcgtaccgatgaaccggcaattcaagcgtagctagttggcaacgccatcgtagttcgtatttccttggtagttgttccagaaacgagccacggcgctctgggcgacgggcgagccacggtagcgtgtggtaaggaagtaattgaagagggcgaactcgtctggcgtgagcacatagctatctggttgggcttggatgcgattccacagttcggtaatggcagcctccaggacggcggccgattgggcattcacggggccatcttcgcattcgcgagcgtgttctagagcctgtcgaatctccggccagtttcgtgatagaggaaggttggccatatcgttggtgagggggggtgttcagctggtggtgtgctgtgtttgagggtcgttggtgagggaggttttcacgattgatgtttttgttgggggggaaacttgggagaaaagggaagatgtgcgccgcgagggctcgtcacaagcgaaaagggtttcaggccaagtagaatgcggaagagatgagactgtgcataagaccaaacaagaaaatccgaatcttttttctcaataattaaatgggaacaggtgtggagcaacgggagagggaggggaggggggaaaaaccgggccagtagtcccgaaacctatattcatgagtgtgacatccgatagcgaggtaaatgcagatggaattagttgacctgtaggctgtgggacgaggttcaggaacagatcggactttaccccgaaattggagtccacagatgagaagataagtccaagggaagtccaacggttctcctttctcctagagagacgtgaatgggaccacacgccattggcgagacctggaaagacacataatccataaggccacaagggtgtagtttgcatgggctcgggattgcgccgcgctcccttggcgtaacggttttctcgggcaattttaatgacatgctccggctagcatcgaactaagccgtctaggacccagatgagacacggtggagacgggtggaaaccgtcacgaacgtgaaggtgattcgtcgaggagttatagggttcaagggtcagtgtcgcttcaagccgtcgactgtggttggaggaaaggggggggcgttaatggccccagagcaatgtccggtgcatcagttaagtggaaccggtgctccggtccttgtggtccttgaggctcgtgggacttggattctccgaagcattccaatcattgccgagttcgatataaacattgcgttagcgttgttccgtttcggactttccacttacatatgatttattcgttcacatttttatcctggcgattgatctcaccatgcgtgccatgacgatatgtactgacttccgagacctcacacagttcttgttttcggtcacgagcgcctttaactgtcgaatctcaggggttgttcgtccgaaacccaaacgctgtgtttctaggaatatcaaaattgccgggtatcctctccgttgcagtccgggcacgaaatcacattctgtatgagtcccgatgtcgcattcaggtgtcctttttttattctcattatttttattcccgcaaatgtctgtttacccctttcgacagaggcaacgcgtcgtagacatgaggcatttgatgcgttctagcgagtgcacacgccattgttttggtccaattctgtgaattagactcttcgatgtgatcttggccgttcgaatatgtcgagcttgaagaaaacatgcatatcgagggatgcgatatcccaagccctaagaagcgtaagtgggaagcgtaggaaggcgaggggtgaccaaaagacggcaaatgttcgaaagcaagcatttgccggtcaacgccagcagcctagaccggatagattcttttcagagaagtcagagagaaggacaacacagaacaaagtgaagaaaaagcgggaggtgcctggaacacggtccacataaaagcgcaactctaaatgtcccaaggccccggcttcccccttcgagcatcttcccttccttcaacctcacattcctgaagagctttgttccttgctttatctctgctctttaggttgaactcagtactgccaactcgcaacccactttagcaggcagctctggctctggaatagcggcaattcatggggtattgcggcctaacacgagaagaagcaagaatgatgtccgatagaaagcatctgccatggtacttcgagggaccagggcattttcccggtctcggccgcatgccagtatgatcaggtcatggaggtcttgaaccctgctacagtgagctgcgtcagactttgaagtttcaggagttaaattttgactctgctaataccaagctcaataggaccaccccagacaagacccacacggaccttcaagtgacaagaaacgaccttaccttagataacattccaaggaattctctacggaacgtaccaattgtgccacatattgcctcgaatgcagattggaagtctgcgaagttccaaacctgcatccgtgattgaagaatactctcaaatagtggcaacatacttgagctagaatagcccgcgcaatgcggtactcggtgaggatgtggcacaacttctgttagctgtcattttggaaatggtagggtcagagcaggatcctgatcacgaacccatccggtatggccaaggagatcttatgggctgtgcgaaccctaacgaaatctcgtctgatatttcagacagaactagcaatgtaatattccgagacactgataccgttgccctaccggcctgattattcgttgatcatttgagtctcttcctgaactggtgtcttggcctggagtagccttcgttgaccgagagaaacttggtatgatacgggcatggcacataatgggattattgatcgattgtactaattgatgctcgagtgctgtcattgaccacaaaagctaatataccagtagtataatttgttttacgttcagatggtcaagtccatcgttgctttcgattgttgttacttgactctgctgatgaacaacccacggggctctttcttgcgtaccaagctcttcagggctagttatatgtcaattataaagtctcgcactttttgcttgttctaccccgtctgtctagctattctcttgcattctaaagctacacacgggtgcaggttctatacataaaaactaggcaaggattgcgaattcaaatattctagaccatgtcaaaggtgaggttttacgtagtctatagaattcggataaggttcatactctatcttaaaggagttataaactgtgctcagtctctttcccttgctttttatacaaacataagtaccctgtagttcccagacacaggtatttgcatattcacataaaagccaagcttagccaaattgaccggcaagcacggataagaattgcccagctttatttttatgacatctcgagggcgaataaggcttctagccctgctggaggcctggaggcctggagccctggagatctatactgctgactaagctatagataaagattcccccaccagcgcgccatttcaacttttgacctgcgccgatcacgaattgtgagaacccgatttgcccgaacaaggtcatttgaaagaaaagaaggattgaatatcgtcgccatggtgttctatttcacatcgaatgtcgttgagccctccgcctttatttatgtcggcaaggacaaattcgagagtatgtcaccgacttggtcaacctagggaataaacttctaacaatggtgtcagacgaggaactcataaaatatggattggacaatgatgtctggtatgtttcccggtatatatttgtagaacttcggggctgatattcttgcgcaacagggtcagtctttccctgtccgacttgcgacaacgccaatcgccctaaccctatacatttgcagttccacgtcgacaatttgtcaagtgcacacgtctacgtacgccttcgagaaggcgaaacatgggacaacatcgccgcgccgcttctagaggactgcgcccagctcacgaaagcgaactccattgaaggtcagtcctcgacatgaatccaagcattcgtaccgatggagactgacttctgggaaggaaacaagaaggacaacattaccattatctacacaccatggtcaaacctaaagaaagacgggtcaatggcggccggtcaagtcacattccacaatcacaaactggtccgcaaggtctatgtcaagcagcgggagaacccaattgtcaaccggttgaacaagacccgagttgagaagtaccccgatctccgagccgagaaggaagaggacacgaagaagaagcagcgcggtgatcgcaaggcccgagatgaacagcgtgcgaaggaaaagaagaagcagcaagagtatgaacagctcaagtggcagaaagatcatgcatatgatgatatgttcacggaagagaacctggaggctagcaacaaccaggaccgtgatgaggatttcctcgacgacttcatgtgatggacaccgaaggaagatgaccttttcctgtgtgtacttttcacagccagcgaactgaaaattataccctctgcattctataccacggaggatgattgatatgagtacaacaaagcagtcctcttatccctgttgcctctttttatctactacggtcatatacaatgatatagcgagatagataaatactcaaaacccgacgtcttactaatgtcgtaagcatgctaggattatttttcaatggacatacaccatgtgaattcccttggcatactatgggaactacgaggctcgcagtgtgccccatacgcacttcagtacagaaccataaaagatccaaacatgtcgaggtagatacaggccaaaaaaacacaccaaattaaaagtgaaaattaaattaaaaagacaaccctagagaagtagaatagccctagggaggttgatagattaatcatcgagccatagggcggaaagggcgctaagccgtgttgacagcttaccctgtaaccttaggaattcaccatcttcctctcccaaggcctttccaaacaccacacagcatgagcgagggaattccaccgtctgctacaccaagtaagggcattcattttgtgaattggaacccgctgaccccgcaaaaggcgcaaagtccaagaagaacaagaagaaggccgcgaaagccaaggccgactccaaggccgacgagccccaagaggatgcgccagctgatcataatgacactgatgtatgtggtaaacctcccccgattgtcattgtacctttgctgagaccctacaagaacgagcacaatgatgccaacgaggccgtacaagtgccagaatccaacggcgccaagcccgccacgatagacggcagcctgcctgatcggtctgtcaagaaccaggagtccgtggctactagcgatgcccccccacaaaccgataaccagtccgaccccgcttccgctggcaccgagccaaaagaccgattcgatgcacttgttcgagatcgcgactcgttacgcgcggaagtagccgatatgcgaaaatcattggaacagattcagtccaagcacaccgcagacatggaagccctgcagcagaaattggaggacgcggagagcaaaaaggagcaggcggaaacgcagttccagatgctcttggaacgagttaacaccataaaatcgcaattaggggagagactcaaggaggatgctgtgcgtggctcagaactcactactcgggctttttggctaatcctgccctataggaggaattatctctagcgcgatcacagatcgaagagctcgaagatgagaacgaccacttgaaggaagagctcgattcaaagtccaaccaactcttagaactatcgggcgactcagcagagagagagaaggagctgtctactcttcgggaccggacgaacttatcccagcagaattggttcaaggagaaggaagaattgctcgcgcaggagtcatacctccagtcggagtttgaacaggcgaaggaggctatgcataattgggaaatccttgccatggaggagcggtctatccgagagaacctcaacgagaaggtcggggatctggaggagcagctcagtagcctgagagatggttatgaacgcgccacccaggaacgcgacacccaacagtcaacagttgacggccttcagcgggctttgcaggaaattcaattggcgcgaaagcaagagctgcgggagcttgtcgagagctctgattctcaactcgaggagctcagacgctctctacgggaagcacagaagcaggccactgacgctgacaagggtctgcagaaggcccaagaagagattgagcgagtccgaccatttgagaaagaggtcaaggagaagaaccttctgattggcaagctacggcatgaggcagtcacgttgaatgatcatctgacgaaagctctacggttcctcaagaaaggaaagccggaagataatgttgacaggtatgtccttgttacctcgaactacctcggtttcacactgacttcatacagacatattgtcacgaaccatttcctgcacttccttgctttggaccgatctgacccgaagaaattccaaatattgcaactgatcgctgccctattaggttggaacgacggtgagtactgctaaatgcaaatgaaaatttttcgagccgatctaattatcaatagagcaacgtgaacaggcaggtcttgctcgcccagggacctcgaatatgcccgggaagctccgagtccctggcactcccctccgcacgccgagcacgccaaatctagcggagttcatggacaacggtgcctctagtaaggagacattggccgaactatggtctaatttcctggagcaagaagccgaggtgggtaatatgaatccatcgcgacgaggaagccaccaaaccctgcctcccaaatgatcgagtgcagaaatgtatgtataaagcagggaggccaagtacttggatattgatactttgatacattggtatttgtcctttccttttgtttgatacctcgcatgtatacaacctatataatagccagcgccaagaaatacaaaggcccagatgaatttgttccgccttcctattaaataaacaggctaagctgtattgggacggaacaaagccgtcttcagctaaataatcgctttgttcatttttatttcagtccttatatgcctctcttgtccttccgtgggttttcagcgtttttcaaaccattagtacgcgcgactcactctgcatctacaatggcctccgctggtaagtcgaaatgcaccatggcagaacataaccccatgcgacgcagacacaactgacaggaccacttctatactaaagcctaccgccctattgtgatttccggcccatcggggaccggaaagtcgactctgctcaagcgcttgttcgccgagtaccctgaaaagtttggattttctatctcgggtcggtgccaatacaaagggaggggttaaatgaattcgcaaacggctttgctcacgcgccccctgaatagaaaccacacgatccccgagacccggcgagcaacatggccgtgaatataacttcgtcacgaaagaggcattcctcgacctagtggccaacaacgggtttatcgaacatggttggtggacactgcgcacgctacaagaagagaagtcggacgttagttaacggatagcgcagctcaatttggcggaaactactatggaacatctgtccaggctgtcaagaatatcgccgagaagaagcgcatctgcatactcgacattgagatggaaggagtcaaacaggtgaagctgacggacctcaatgcggtaggtgtcctagacaatctgataatggtgcgctcctctgatgatctctagcgtttcttgttccttgccccaccttctctcgaggtgttggagcagcgtctccgtggccgtgggactgagaccgaggagtctctacagaagagactcacccaagcccagaacgagcttgagtatgcaaagctcccggaggctcacgataggatcgttgtgaatgacgatctggagaaagcatacgttgagctgcgggattgggttgttgacggtggtaagttcggtgttgcgcaatagtacactacattatgcataggaaatgtgatttaatcgacatagccaaaaaggcgacatccccgtttgatatctttcaatccaagaatagaagtctcgtcaagttaaaattaagaaaactaagtacatggaaagcaccagagatggcacgagcacgggagcgccaattctctttttccccggcaatacaagctcaatggttctcccaagaagacacaagatgggatgtaggatacgataaaaacaaaacgcaaaagaaaggaaaaatgggatatctgcaagggcctgctggcgtcaaaagaggacagtaagttttcgaagagcgccgtcgcgcaacggtcacagcgctcacatcagacatgaaagatcagagtttagtatccgttcatgcctgtgcgctgcgagttgcggctcagctctcggtcagcggaggggctgataggccggtttccaccggtgtggccaccaccggcagcgctgctttccttcagggcaagcagctgcttggcacggaaggtctcgtagtggatctggctggtagtctcgaccagatcctgaaggtgggtgcgggtcaggaagttgcgcaggtagacaaattcacagtggttctcgtcctcgacgttaatgacaccccagcggttctggcggccgcgaacctgcttgccgttgacaacaatggtcttctcactgccaacaaccgagaaaggaatgatgtcctgtaaccagaggtcaatatccaatcagaatagctctacctgggtcaagcataccttgatctgagcgttgatagcacgctcctcatcatcgagctcgtcattatcgtaagggtacatcttcaggttgtggaaggcgaactcctccttgatgcgctccttgaaggcctgacgctcttcgagggtgagggagtcggacttggcaataacgggaacaacgttgacgacatcggacagcttcttcagaacaacgatatcgatgggcttgaggctatgcggggtcaatgagttagtccagaggagctctcaggaagctaaggaatgcgcggggtaagctcacgcatggccggagggctggatgaagaacaagcagcagtgaacacgagtatcttggatgtaacgctcacgctgagcggtgagttccttgcgcaggtatgccgagtgttgatccttaatgtacttgacaatggggtcccagctgatcatgattagcttagacctagtggctccatcttgatggggcttgaattaccatcgatcgttgttgacctggtcaccgtaaccaggtgtgtcgacaatgttcaagcgaagacgcacgccgttctcctcaataactagtcacccgtcagctattccgcatcgagctcaactccctgatgacaaacgtactgtgcgactctgtcttgatctcggtggtggagcgaacgggttcattgggggtgagacggcccttggagtcaatcaggtgggatgcgaagatagtgttgatcagagtcgattttccgagaccagtttggcctacgcgtgaaagcattagcttgaggctttcatcggcgcgcaggtattgcccaacacataccgacacacatgacattgaactggaagccacgcttcaacagcttgcgctcgatttgcgaggtaatgctgtcaaaaccgacatggctatgggggaaaacagtgggctgttgagccgtagctgcggtggtagcggtggccattatggacggagagatgatattgaagctgaacgaaagacagaaatagaagccccaaaaagacccgaagagaagagaagtatgtagttgaagcaagagcaccccttattatcgtcctctttccgaactcaggggtgggctattcctaatcgggcctagcgtctctccacgagaaaactaccgtcttccccgattgcgcttttgcttcagaccttgtgatagctcgcaccaccagctgaggacgaacccccgttttttgttcttgaaaaataccctcaccatggcattgcgcctcctccctttcgctccggcaaacatgtcgcgctcacttctgtccgagtacctccaattcccccgactcgctcggttcctcccgatcacacccatcgcgaccagcggattcctacaaccggtttcgatctctctcaatatcccatccctcctctccgatctttgggattccgtcctgcgcgccgttcctaagaagaagacctcccacatgaagaagcgtcatcgacaaatggccggcaaggccctcaaagacgtgaagagccttaatagatgcccgggctgtggccagatcaagcgtgctcatcttctgtgcccaacttgtgttaaaggtaggaccgaagcccaagctggaggaacatatatgtgattattgcggagaagctgactagtcaacagacatcaaggaatcgtggaggactctggatatggcatgagagcactgtaagaaataagggcttgttcttggggaatcaggatcaacattccaaaatcccaggctcaagctcaacaaaagagattgtatttctagaattggatgtggatacatgctgcatggcaactggcgtcttggttttgcgggggaaatgtttcgatatgactttataacaatccgacctaggtcggatttgaacgctgtgatcttttcaatttacctctttccatgtaactccggagcaaaaggcactacggagtacaattgtagatgttatggtgacggcggctagtccgggtgggaataattagacatattcatgctattacgactttactgctctatatgtgagcgtatctgcctctacttggctcctacttggctcactactagctttatagccacgtagtcgagacaagaggtactagatagatacatgtagtcaataataccaagtacacagtaaacagtgactatttcaaccctgattagctccaagcttaattttattacctgctatccaataatatagagacacttagctcagtagagttgttatagcacggtatatatacctaatttgcatgtggtaactatcatcttcaacaagatgcctctatcagccgtaaagagaaaaaaaaaaggcgccgataaaggcggaacgcgccttcgggccccaacgtcattgctcctccgcaactaaagtctcgacacagtcgtgagtgagcacggcatcatcagaatggtaaggtcaaatcaaaaatcaatagattttatcgctaagggacattttagtcgaaacaatacctctcgaggggttctgcggacaatggtgggcttcccgatgcacatatatcctgggtgatttggctaatatctgttttatagcgcacattattgatatcttctcgctggctataaccgacaagcaaattctatcaacatcgggtgcctcgtccatcaaagtgcattccaccatcgacgctgacttcccgctggtgcagtccattgatggtgcccataccattggctgtcaccacatcgtgaccaatgggaatggctcccgtgcaatcaccgctgggtttgatggcgaaatcaaggtctggtcttgtcaggatgggcattgggctgcagacaccaagctgactggtaagaactgcccctctttgataggctacagggtgcaatactaatagcaccacagccgacctcacaaatgccgatgcctgggccatagctatttccgaagatggccaataccttgctggtgtcacgcaagaggggcgcattaatgtatgggatttggctgccgatggcactcggattcgagaccatgagaccaagggcagctttggtacttgcatcgacttggtgagatttcaaatgcagccagatactggcccctgttaaccttgacgtctagtcccccgatggtcggttgatcgcttcaggccacgaagacggcgcagtctatatcttcaccaccgaaacaggccgcatgccattctctctttcaggtaagcgaagttgtctgagccgagcagaaatacaagttctaactcggcctaggtttggtcaatcctgtacgagctgtggctttctcgcctaaaagcaagatcctagcagctgctggcgactccaaggtcattgtgctgtatgacacttcctctggtgaacaaatcgccaatctctcagggcactctgcctggatcttgtccctttcctggagtgatactggcgagtaccttttgagcaggtcagtcaatatcctatgcgtctatacgccggcaagctgacattttcaagttcatttgacggcaaggtcaaggtttggtctatggagaccaagacatgtgtcgctacacactcagaaacagataaagccgtttggaacgccaagtggcttcccaagatcggcaagacagaagggttcgccaccgctggcgcaaaccgcagcattgcattctaccgcgaggctactgggtaaaggagtggctgaacatggggcgttgcagaaatgtccttgcaactgcgttatgacgatttcaatggaacctagaaaaccttactgaactatgcataaaaatcatgaaattcgtattggaacaatgacagtgacccaaacgaccgtgtacttgtgcttatttcatcgcctccacaaacaacttgcgcatccgcttcaagaacgccccaaaatctcggtcatcgttcacgagatctacgacatgctccaaagcatcccggtcaaccttggggcgcgtatggaaaacctcatagtcgcgactggcagtgcccaattcaaaccaagcctccgcctcccaatccttctccaatagatggctatagacaaactttaaccggtcctcacgaccggcgccttcaattctaatacaaaggtaatcctgccagaactccaactccgggaaattgagacgcgattgcgcatctaaatactgtgcgtgagacttctgtgcctcgatcttttgacttatcgccttctgcgtctcggcaatctgttgcttcagacggtcgcgtttggtaaggcgggcatcgcgttctaaggtgatagatgagatagccgcgtgcatttcagccgcttcggctgcttccttttgaagggtttgttcatgggtttgtgatttgaggttgagaatttcgatatcgcgctgtcgcatgcgctcgtcctctggcaggttttgttaggcacagtcgtgggatatggtgggaacgggggtgttcaagtatcaactcataccttcatattcagccatattaatgtgaaactggtttcgttcctctaagactcgtttgcgaccgcgctcaataaatgcgtcgaacttcactgtgaattgtgccatggtattgcggaggtcctcgaacccaaagttgatgctgggcaatgagtctgccattgacggcgcgtccgccgaggcgagtggtgggcgcatgccactcgtggagagcgacggttcgaatgaagaagccatagtattgagaattagattgtgagtagtgtatggtgaagtttgaggttgacgcggggacaatgcgagagttgttttgggttgcggcgcaacaactccgattcttatcgataaggatcaaaaaacttcccggtaccgtctccgcagctctgcatcctgacattatgcgcatatgtatatgaccgggtgaattctgactgctgaaccagtttcgacatggtttcgccaagtcctgaacctgatggatgaacatacaagcagtgctctccactatgggcacgtcggacgagctgtctatcttcctgaggagcaggaatggacgttcactcgttcttttgctaggcgtaggtacttgagcctccttttcttcaaaccagctaacatgttcccaagccccgttgatcaaatataccggtgtgaccaagacaaaaatcccatcgcctttccgctcagccaaagctcgaccaatacccagagtacccgagaaagaccctaggaggttaatcacaagcgcgcatcctgatttggcggcatcgtggtcctccattcgcgctgaacctttgtcgaaagctatcacgactgtagccgaaaaatatgacccggaggtctctgagctttttgatctcggttatgcggtggatcaaaggcgtcatgacaagaggctgcgctcagttgcaattgcggtggctgttaccggagaatgtcgtaatataatctcatttcgaacactggaagaggagattttggagttgacttctccacagaagttagcattccgtgctccatctatcagtgaccaggaaatgtctgaatggtccaagtgtggtgcgccggtacgtcaagtacactttgcacgtcccttggaggagaagcccatgttcctggctgcccgtctccctgcaacgactacaatattccgacctctttaccatttcgaccctgtgcctatgtgcccttcgggggatagtatactgggatcatccacccctttgaaaaactctcggctggatgcgaatccaatcgcggagctatgtgtgtcgcaaacaggtggcttctcacatgcagatgtgacctttaacccctggtatcagagacaattcgccattgtagacaccagaggtaagtggagtgtctgggagatcaccggcagacagcgactccagcaggccacttgggctgccgagcttgtcaaatcaggctcgttgcccatgcaggattataaacgcaaacatggttgccctcgccttgatggctgggcatcaatcgagtgggtccatgatgttggatcgctacttgtctccaatcgtcacaacgtcataatctatgccttcacggatgaccagattccaacacgcacggttgagttgggaatgacaaagccatctgagtgggttctagatgttcaaacaaactcgcgcaagccatcacagtttttcgtcctgacgacaacgagaataatgtggtttgatgtcggagccctaccaggcgagcatgacacaagtctttcactataccctcgagtgtcctggaggcactttcgagaccccgaagacacgaccttgcgacttagcgacatagtcgtataccaaggtatgtgcttgcgcgattgaacacggacttctaatactaagttattatctagatctgtatctcgttctgtattcacagctcacccggctagtacaagtattcccttgtcccttcatatccgatgaagagactgagtccatatctgtacccgatcccctggtgctagatgcgcccctgttggcggatataccgtcaactcaacacgactctgtcgtgcgattctcgagactcgtatttagagaaattgcccactctattgcaccagtgggtaggaatttctacaacgccgacttgccattcatcaagcttttctggatggattccaatcttgccgtccacgaatctactttcgaggccccgcgcggaaacccagacgagccggactcgtttcgcgaaagcagtatcttgcggttaagaaagcgttatgctccgacaatatgcgctggacccaccgatgactttgttgtggatgattgggatgaatcagcgacaaagcaaacgattgttcgtcgttgcaaaccccaaatgggccgcgttgatacaaggtcggacttgcagtggaccctggacttttctggcgtctaccaaatagcgacagggaaaatgaaaatggaaatccatccacaaaagcagacgaagagattaatgcccaaaccaaggacatttgatgcgttaataggggacctccaaatcgaaatggagaatggatcggaccaacctccaggcaaaaccatggttgaattgaccgacaagaaacttctggccgagggtcttgatgaaagagcagatgatctgcaacgactcatttcagcactcgtctctaaacagccgaaccccaacgcgcaatgtcgatatatgtttctaccactcccatcaccgaacggcagttatggcatcccggccaaactctcaggcgaagcagataacgatcttttaaatacatatgatcgaatcgtcgatgattggatgtctaccctgcctcgcgccatccccgtgcagacccgactcatgaaagaaaaagtcattcggggggttgctgtcgatctcatcctttcgcgcctagtaaaaatctctacctcattagatagcatcatactggccaagcccacagatcctgtcgaggaccaagcaattgagaaggcaaatgaaaaggccgcgacacagaacaattatctgcaatcgagctacttctcattatcatcatcgcagatccctgcaagccaatcatcaatggccaaaagccaagtctttggatctgaaccagacgcaatgccaatccagcagtccaagtacaccgcagtcccggtcttgagtggtctctcagcgttcaccacattcaagaccccacgtccagcaccacgaaacgtgacaaacctcttagcgcactggtcggtaggaaccaacccggaagactattcatgggagaggatggaagacgaggaaatgcgggagacgagggcacgcacacccaggagcagacggaagaaacgcccacagcctcgtgaccaatccctccctgcgactccggtaattcctatgatccggacatgggacagtcagccactcgcacctccccgactcaacgtcgccagtagtcagcccgcgatggatgatgtgtcgatgacccagatggagcggggagcttttggagcccgaccactcaagaagccgaaacagaagaagaaaagagcagctggattttagaaatggcttatagatcaaataattcaataatacatactctatacttccgcactatatggcctactacaggagacattggctaaccaatcgcgaatatggctcattctcaaagggatgaattatgacaaatgcagatcaccaaggaggacgccgaggtagaataagaagtatataatctccttttctctctttctatttctctctctttatctctctctcagccattcctccttttggtatattcacctgaaaccggaagtccgctgttatccgccaagcatcatcttcccctccttcaacaacaccccgcaccaacacaaatcaaattcccaccatgtctgatcaccagtacaagttcaatgtgaccatgacctgcggcggatgctccggcgccgttgaacgtgtcctcaagaagctggaaggtaagcgacgcgcggcctgtttcatcgttttttgatcctaacacgttggtctttaggcgtcaagaccttcgatgttagcctcgagactcagacggtcaatgtcaccaccgagcctactcttgcctacgacgatgtgctggaaaagattaagaagactggaaagactgtgaacagtggagaggcggatggggagagcaagcaggtttagattctctcaatgctcacggtgtttccggtcttatatataccccttttcgcatgaggcctggaagtcaaactcgcgagcttgcctaagctcgtggtactcaggcccaagactagactcggttgctaggcagtgctaggtcgaacataccaatagcatgcattccaacttcggaaggttttaaggttgctctggaattcctatgactaaatgacccatgacgagaaatgaaatagatagaaaacgaggggaccgcagttcccgattcaaattggtattgagacccatgaggagagaaattctaagaatatgcgcaagggtatcatgaacaacaatgcaatcaatgcaataaatgcaacgaatgcaatacaaagcatctcaaaacaaaggggggatgtggtggtagataggattaataatccacaatcacgaaatgtcttccatcagggaggggatagggtggacgtggttcaactctttgaacatagactgggcgatcctgctccgtagtttgggatgaggaagggtaattggaggatggtctgtatctgggttagtgcggaacttctcggggcataggggaaagttgtgttgttgaagtggttagtttcccaatgaaggcttaccgcaaggagttgaacccgccgctggctggtctttcatggggggacacgtgaggctggagctttcctatgatagagtctgaaaaggtgcgaaggtgatcatgggaaggagtcactcgcggtcctttgggcaatgagccacgttgatccgacgaaacttgagacaaattctttgtgccaaggtagtcaaagtctctaatccgggtggactgagacggttctccaatgggcgtggcctctggtccggcgcgcctggagacgtattcaagtggagggggctcacggtggtcaacatgccggacaaagtcctcggcataaaggttcctgtctgtgtggacgttctctgataaagggcggccactatcaatgcgggtgtgccgcatagcccgcggctctttcggagcacggtccgaacggaaactacgatcaccatggtaaggatgccacggtccggaattggatacggctggagccgctcggaaggtgcgatccccttccgagacaacgatactggtactggaaagcccagcctgagctttaggctcgtatggtccgctgatatgctgtcgacccaagactgaccttgtttctaggccatattgtgcgttggaataagaaagcgagttctggttcctttcccgctggtatcctacaacagggggttgttccactggcagatagtcccgacggaaatgaggtagctccttgggtcggtggtcttggacaagctcaaggcgacgataagggtgtggcgcgaatccttcggaaacgggaagtcccataggccttgcactccacgggtctgggcgggactcggttcgagaacgttcacgacatgtcagacgccttcttttgctcgcgtgttcgctgtcaccttccttttcgatggcatcgggatgatgccctatctctccttgagaataccctggcgtgaccgatcggagggacattttgttggtcatatgtaccaaaggatgcgaagcgtcagtccaccggctttctattggccgggggttttcgattgagggcaagatagagtcctgtgtgtttgaacctggtctgagaagaggggtattgacggagtcagggtaccgtcccactggggtcaatttctggcgattttcctttggtccgctcacaaacacaggtgcgttggtcctgtccgactgaggaggcagtctttcttgtcggaatatgggctccatcctagagggagggacatcctgcgagtggctcatgatcacattcctgggcccagagagttcttctaggatttgtaactcgggtgattccttattagttagtccagttggcctggcgttcatatcataggttgaataattctgttggacatccgagtgaagatagttctcctggatacctacatgtctctgtcggtccattagtggaatagcgagcactggatgtgcttggttatcattactggctgagcctggagcgactcgccgatgaacctcggcgtgttgaggaactatatcctggcgcctagcagcaggtacttccttagtaatgcgttgctcggcatatcgagggctttgcttttcagcgggggcaccggaaaacctcggttcttcggtgccctgtataccctctctatactccttgacagctcgggtccatgctttgtacctgttaaatcctcgacggttgatggtatccgtggctggggctcttgtgacaaatcggaacccaggtggtgcctcctcggatagttcccgtggaagatcctgaccaagagaattcgtattgtccataggctggcatcggatctcatgggcccgagtatcgcttgcaagtatttccacactggtgtcctggtgacctgctgaagcaaccgcatcttcttctgattcactgtcttcgtcgtccgagataacgatcacctcgcggaaaacatcttccagaactgtctggccgttctcatcgtctcctcgccactcaatgacttttgctagagttgtgtgttccacaacccctcttgcttcgtggaaggaagtggttttcaaaaggcgatcgtagtcagtgtagacatgccgaacgtgagcaaccacagcgagttgggctctgcgagccaaaggcaattcggtggcagtcccaacttttttctgacccttttttggatatcaggttttccaatttctcatttctcaaatcaagattgagtatatacgtaccttttgaaaagcagtcttgataatttgattcaaatccttctctggcatgtttggaaagagatccttcaaggcgtcccgtgcttctgtgttgagggtttgttgagaaatttcagattctccccgaatgttgttctctagtttctggatggggaaggtactaggcactgttttaccggtgcttgtgaggtagaaccccagttctgagcaaacagctgccaccacggtactagggaaatgataccctatccgatgaacatgctgggacaggttatgatggcgatggtggggcgtagtcttaaaaataagcagtgttgatgattagcaaccagatggggttctcaccgatactgcgtagatctggagaccctcgtctcgacatcgctccttgcacgttgtagtgagttgtggatttcccgcaggaatgaaggtgtagccgcttggtgcttgcgcttcaaaacagatctgttccatttttttgttaatcatttggtcatgccgaagcagggaatatacgtacaacactccgaagcttcttcttttcttgggtgaccgattccataataaccttgtgtcttctcgctcttctttgcgtagcccggtcggggccatgcctgaccgagccagctctccttatgacgcgggtcatacttgcggttcagcttatcgcagaaccttgcgaagatgaagatttcaacacatcattcacaatatgtattagacgtgtgatatgaacaggtagatggtatgtgcctcgttgcctggatcagggtgaatggcgcgtggtcaagtcaagacagtcgtgttatgcaccgcagtaacgaaaaaagtacgaagtaaagacaccccgcggtcaaccgaaacaggaacaaggcccttgatgcgagccttctgggtcaacttgagcaaaatcgtagggagcaaagagcaagaaataaaaaaaagagaaagaatgagaatatcaagaaggatggagggagagagagagggagagagcgcagataagatggctattgcggcccaagtcacctcctccccctctcccgatcaggctagtcctgcctgaggcttcagcctttccccaactttgaccgtcttttgttcatctcccctccaatgcgaatccaacatttgaactcaccacttcggatctccgttgattccgtctgattccgtctgattgcacatctgccgcatattccagattcgttggctcgtacatgtccaatagatcggccatgaacgcttcaatccaggccatgaaggtggatacacgagctatggtccacgcataccgtcatctctaccgacaggggttgaaagcgattcaatattcgacgcccggtcgccatatgcttctaaagtccctgcgaaaatcctaccgttcctccccttccgaagaatttgatcctgccaaaatcaccaacacactccgctttctcgaacgagctactgaggttgcgggcatggaacacaagattttgaagaaccttttgctagctagatattgggagcaagatcaccttgtgagggagtcccgcgtgtgagtgaccaccaacagaagtggagaagaaagccgctgacttgccctcagtccgcgatccctgggactcggccatgcagagaaccagctacggacaagtgtctttgaccattacaatttgacacttgaccgtttgaatgagagtctagggacatgtctcagatgattcgaaccccgcagttctcgacttctccctcagtgctgatccgacccgctatgccagatcgtgcgtccgttaggcctcagtgcttcccttgggcatgaatccgcaccggcgcgaggcagctcgcccaaaatgggattgcacataccgggtattgccgtgatcaggacaccggtacatatctcaatcgcatcaggattgcgtaggacacgatgacccgtcttgcctctaggtcagcctcgtgcgttgtattttacaatcttatggcatacagcacattatgtcgatggcaatctacacgccttggcattcaatgcaacgtcgtatagccaatcctcgtctccggacttgagactcattggtagatacatagtaggatctgcaggaagacagcattgatgatagtctactggtagaatactttgagcaaattccaacccaaatgatagtctctactccttcccaatattccctggttttcgagtccaaccgtccaactaaaaagtgtgccaatctcctgaggctccagttccagagcatgtgacgatgattcagcaccggaggcggtgcccgtggacgtcacatgtcacgatgtctgctgttccggctccaagtttgggtttgattctgcttgatttcaagcatccaaagcgatttagtgagatgctggtttagagcccttcatgagtggtttcatttcctcattgctgatccaagctggaatactatcccccttaccaccccaaccgaacagtcaaccaaatgacgacgaagctaaattccacctgaacaaaccgacatacccctcgtgtgatagtgaaggccataaattgagtcctctactggaccaagaccacggacagaactcgaattgcggagatgcgggtgcggggtccctgcatagccctcctttcttcacaaccctaccgaaagagatggatggccgaaactcgcaatcggagggcactcgatcagtgacccataacacacccggatccatccaaaacatagatgcgaccgcaggcgcctccattgatcacacacatgaaatcgacgtcaccgtgcagccggacagttcggggaattcactagtttcacatcccagcgaggcgctgagctcgtccaatgagccacaacatgcttcaacaatatccaccagcgagcctcggcaatctctcgacaatgcctttgatccggagggactggcacagtcttctcttccggcggatgatgggatgggagttctaagaagcaagatcattgcaatcagggagttggagctcaccaatgttgaaaaggcgcgcatggttcacggtttgatgacagaaggttaccactcatcccgtgagctccgaagcgcccctggtctaggggtattctcaactccatcaagtccggcgagcttggggctgccaacaagtccgaggactccgagggcctcggagatcaatacttctaggtcgggctcaccatactccgaatcagactctctttacgagacaaccttcaatctcacagctgaagatctgcagcccacctttgtacccaaggtagaaacagaatcaccagaactcgaaactggggacgaagagggtgacacagaagaacaagaagagactagtctggggtgtgtgcattatcaccgcaatgtgaaacttgagtgccacacttgcaaaaaatggtatacctgccgcttctgtcatgatgaagtcgaagatcactctctcgttcgtcgagataccgaaaacatgctttgtatgctatgtgggtatgcacagcctgcagcgcagaactgcagacggtgtggcgagcaaactgcgcagtattattgcgaaatttgcaaactctgggataacgacagcaaaaagagcatctaccattgcagcgactgcggtatatgtcgaattggacagggactaggaaaagatttcttccattgccaggtaagggctccgacagaggttagacgatactggtactaacaacatatagacatgctctgtttgtcttcctatatgtattgagaacacccatcgctgcattgaacggtccacccagtgtgactgtcccatatgtggcgactacatgttcacttctccagaaaccgtcgtcgtcatgcgatgtggccacagtatacaccacaagtgtctctcagagtactccaaaagttccttccgttgtccgctttgtagcaaaactatcaccaacatggaatcgacgttccgaaacctggatcgtaccatcgatagccagcctatgcctgacgagttcaaggataccaaaggccttatttactgcaacgattgcggttcgaagtcggttgtcaaataccattggctcggcttaagatgtgatttgtatgtactcttcgaaaaaaatggtcaacacctgctgatagcatctagatgtgagtcgtacaatacggcccaaattcgcattttgcacggagatatgtccactcaagccgaggaagacttcgggcaagacctgcttcctcggcctcgatcgtcttcatacactgaaaacgatgacccgatctcctcttccctcccagcactaaacgtcaataatacatcagttcctcgttcacggctcagtgcgcctatgtctactgaacccgttagacgattttcatcctacaacattacacgaggccgtgctgtctcgcccgtcgttagcaactactttggactgccgactgagcgtgaatcagagaaaccttcatctattcccttctttgggggaccatctcgtggcgagaatgaggattacggtgcattgaatttcttgagcaagaagcttacataccgatatggactgtttggaggtgagactaaatcaaccgaaagcgtattggaaactgagaatgaagaagacgacgctgagtcttctgactcggctgaatcagatggttctcctggtattggggatgacgacgaggaggaagaggaagatcaagatgaagatcacattcagattttcggtcatcagtgaggccgatccagatttttccaagtgaacccagatgctcgtcgtccaaggaagtgtgacccaacagctatccttgccctctttaattttcccccatcagcccctgcggcgagcaataaacatcgttcagcccttgcccacaatctacccggtccctgggttcgatttcagagacatctctgaaccggtgcccatccctgacaagaccgactcaatatttctgtcctggaatgatagcgccgtcattttctgtacctttacacatgtgatgactacaaatgtccacaactaagtaaagggcacacctcaacgcaactcggggattgttgcttttacacacatcaagcagccggcttcgctgcagcatagcgttcacttctttttccggtttaaagcacactggtatcatgacgcaacgatagcaattttattgaaactctccatcttacttggcctacactagattgctagaaatattatagtcttctactttcactgcgtacttgacgatataaagtatttaaatacctagtagaagtagctatagtaacctaaaaaccacgtagatagtcatttcccttcttacaataaaagccaatcggactaaagtgctataaaccgatagccacctaacataccaagcttccaagctataaataggattgaggaagccctgaagaggcgatggatggttatcgcgcttacctcagcttctggttgcagccacaagattccattgacgatccaggttgtatcagacatgatgttgcctggtttcatcctgtcttgcttattgaaacacctatttagccattgagccgactcatctgacttccttttcctaatttcccgtcctgaaacgaggcacggatccctccactcccccagccgagtgatgcgcatgtatttaactccttgatttcagcccgtctagattgctcctttcttttcttaaaagactggaaatcactcgacaaggatcctataacctagcttacaagtgaaattcttgtgaacaactccaacctcttccaatctcttatcagtactgccccgcggaatctccttcgtcactttatcagcgccgcgtcgcacccgcgtcagccgtactatgatccgtcgcaactccgacatcgagattcagctcccggacgctggtccaacacctctctcacccgattccgtgagcgatctcgatgtggaaatgttctctgaggagctgacacttcccttgagtctcccaccacacatcgcagcccggttcgcccgcaaaagcagcaaagcccgccgttcctccaccgcctcatctcgacgaagctcggtgtcatccttgcactcgcaccattccaacgcgtcctcaaatggctcgctaagtgcggaccatattgctcagcatctccgtcgcacgtccattttggagagccgaaaggcacgactcgctgatcgtgcattgcatgcggagaaagtaaggctgcgagccgctctggctaaagcagccacacgaaattttcagttcgaagagagggcgttagccgcccagcaggcccgcgagcgtctgctcgccgatatcaccgctaagtgcgaaggtcaggtcagacgggccaaaaagaaggccgaggaccagcgggagaagaaagctgccgaacaagctcgcatgcgtctggaaatggcggagaagcttgcggaggcagagaaacggcgcacattatatcagaaaacacaccgccgccagcgtactagcagcttgcccgtcaccgaggagaaaaagatgtcccgggaggtcacaaagtcggttcagcaggatgcggctgcgcggaagatacagcgcgtatggaaaacccacaacgcgaagatggttatgcagcagtttcagtcattgaacctgtctgtggaccgagttcgcgacatgacttttgaagaagttggcgctctcctttctgacagcaatttgctcgacactatgactaaagttctccgactctgcggtctacaggatatggaaggtggggccttgggtgagaggggtgccgtacgcacgttcctcagcagctatctcatcgtcactcacccgcaagaggttctgagcagcaatggagatcaggagcaggatctgattgctaaggcccgggagctgctaatagcctttcatcaggtcacggcgctgctatcgtctggctgttgctctccgtctgtgatcaccgcagatctccagaccttgtgtgaatctcacaacgtgtttttctctgctttccatgcttggaaatcccacgactctagcgtactgattgagatcatggtcgcacagttcgttgaattggaattgatttggcagacggtcaagaatgacaaagctggtggtgccgcagaagactacagactgggtatccgacagaaccaggtccttttgctagcccgcctgaagagacttgcagggcccgagcgacacatggagttgatcagagattcattgaagaaggccaagcgggagaagaagaaggctgcctccaaacaagctatcccccgatctgctgagactgctcctcccaccacggttacgcagagtgtcacatcgcctcttagcgagtcattcaacaacatcgatgccgcagttttccaagagctggataagcagcggacatcaccccacgagagattcaccagaattctcactcctctccctgaaaatcgggagctggtgcatgaacttcttattaacaaagagttcaagatcgaggaagcaccatataccgaaccacgcagacagattatgaagcagatgtgcgatacaatgagacgaggggtggaagctggacacagtaccaactggactgtcgccatggccacagtgatccaagatcgcttgctacgctcactccaacagggaaattccctttatgtgataattagtgaagtcttagatccaaaactggtccagggacagtgcgaggctggcacattctcctatgataatttcttcggcttcatgaacaacatcttaccacgcctatgcgctccttaccgggaccctgtggtcaaggcatacattgaggatacttcaggcgatgctatcgatcggctgtctcggttgatgagcatcattgacctgctgtcactcgaccagacgaattttatgatccagcttgctgcaccccagctcatcgaagaagctccgggttatgagcggcgggcatttgaccgagacgtcacggacgggacagtcaatttggggaaggtccgacggttttggcgcattcatcgcaacataatcgttgatgagatgaagaagcgagacccggaaggcatccagggtgaaccacgcccatcaccaacacgagtctacgcccaaggtcttgccgacaccgttctaagcaatgcgcttgtatccgaagatataattccagagactctgagtctcgatcgccaacgactcgaacggctgcacgccagggcattccaaatcgtcgcaacagcttccatcctgttgacagcaaagaacctactcaagcgagacgcacggtctcaatggaaaccagaagcagaccggattctgtctctggacttcaatgagatcagcgcagagcgagtacagtctatcctcgagtcgacacatccgatgccacccgctgcgagtgcccagctcgcagctacgatcaaacgagtcctcggacccgtggccacagcatgtctcgcagccgcaccccagctcgcggtagtaacttcagagagctctgcctcagatgcatctgtctcctcagcagagtcgcacggagccacaacctccgcggctagcttctcggatccagtgacgaaactcattctctcccgccttcgcagccacgtcctctcgcgtctcagcgcatcgagtgcctccgagcggatacgggctaccaccacggccagtcagatgctcgctggtgcgggtatgccggagtttgttaatgaggttggcaagttggttgaagaattagagaaggtccgcgaggtggattggctttgccacgggtcggtatacgagggtttatacgaagaaggtgctccagcacaatgaaggcgttttagaggggcatgtataatgcagtctatgttttttgtttttgttcttttgttctttcattcttggattttggaggttgggactttggactttggactgggcagactggcagggtatacgactagttcctagagttttgtatggagtaatgagacctttgacttctatatatcctagattattgaaatgttaaacatgtgaaatgtcccatttgatctgaaatttatatacaaccctcctatctaatcagtaacccccacaccatcaaaaatccaacctcaacaccgtatccctccattccattcccctccaatccctccaataccttcaattcccaactaaaacgccaaccaacatgtctccaaatgtcactatcacacacctatccgacctcacacccccctcccaagaacgaacctggctcacagccccgcacccaaccctcccaatagtcgcaacctgcagttcagacaagaccatccgagtctactcccttacaaactttaccctcctctccacaatcaccggcggccacaagcgctccgtccgcacagcagcatggaagccacacatgtcgggggagtccgttctcgcaacgggcagtttcgacgcaacagtcggcatctggcggcggtgggataattacgggcgggaagacggcgccgggatgggaatgaccaatgacaataaccagaccccgacggatacctctgacgccgacagcgcagaccgcgaagaagacgaagaagaatggcgcttcgccgtcctgctcgacggccacgacagcgaagtcaagtccgtatcatggtccgcgtcggggatgctgctggcgacgtgctcgcgcgacaagtcaatttggatctgggaggatctcgacgacggcgataacaacttcgagaccgttgctgtgatgcaggagcacagcggcgatgtgaagtgtgtttcgtggcatccttccgaggagtgtcttgctagcgggagctacgacgacactatccggctgtggcgggaggatctagatgattggggccaggtggcatgcatcaagggacatggggggacagtttggtttttggattgggagggggatgatgcagagaaatggaacgggccgatttccgattccaattctgagtccgagctgagcgctttacaagctcagtggcgttctcagagggcgctttccggcccgcgcctcatctcctgctcggacgaccgcaccgtgcgcgtgtggcggcggcagccgaaggaatcccagcagatgggcgcgttttcttctgccacgacgggcatcccgagtatcattcggcctacggggacagacgaggcttgggaggaggatgccgtgctcccgcatgcgcatgaactgcctgtatatgctgttgcgtggagtaagcggaccggacttgttgcttcgactggtgcggatgggcggattgcgatttatgaagagcgatttgttacaccggagaaggaggaaaagcaggatgatgcggatgctatggatactgcgtctagtgatgtgctacgaacggagtgggtgcttgttggtattcaggatggggcgcatgggatttacgagattaatcatgttgcttgggcgaagagagcagatcggggttctgggggtgaggaggaggtgcttgtctcgacggctgatgatgggagtgtcaaggtttggactgtgacgcggtaattgctttttggaattggcatgtgttgggtctaaatagcttataaacaaaaggcttgatgtatttagagtccagaaaaaggaagaatatataatcaatatgtcacttgagtagtatgatcgcagagatatcagaatgaaaatcatatttagaattaaaccgaagactccagaacaccgtgtgctttatacagatgccaaaaatcattccccttcctgaaaccccttcaaaaaatcacttgttatgaagactggcggttctcaccagtttctggatgcgagacatgaccttcgtcgtcactagcttcgccaacagcgtaatgctcccgctcagggctaggagaatgaagctggtcgagctcactctcatcaaaatcaccagcctcgacatcacgaccagaatgcttgttctggaatctgttgagaatggatgcattgtccgacatatcattatttgagacgcccttgtagccccggcgagtacggcgactgcgccagatgaaaaagccccaagcgatcacaccgataatcacaataacgaggacggcctcgccagacttagcataagcgtgcatctcagtctgtttcagcctctccttctcgttctcctcggcagcggtactgttggcctgtccgccgacagaagtctggggcagcttctcgccgtcgatacgcgaatcggaaggctggccgccaatgctggcgatatcgaccttcatgaagcgatcgagcatgtcgcggctctggcgggggttgtcgaatggaaccatatgactggagttgtagaagagcacgtaggtgaggttacgggcggattggtagatgccagcgggctcgccttcgaaggaccagtcgtggcgcggggcccagacgccaggggaggtttcgaagccgctgccacccatccaatccatgttgtggatcagagtctcggttccgatatggttgcagatgaggtccttgtcgccgctgaagagcaagacgttgatgcccgattcgatcaatcccggaagcaggtgaacagaggggatggagttcttcgcggtgaaggccatgtggaccataccagcgcattctgtccagccggatttctttgctgggttgatgttcagggccttgacgacatccggtcgctggagatacggctcaatgtttttcaggtcagggggccagttcatgccacaggatttggcttcatccttgagacggacatcgtacatgttgtaacattggtgattttcggtggttcgatcgaggaattgttgcaagactagctcgcatgcgccgacatccagtttgttcttcgcgccggcagtctccagcttcgagaggcagacttcgttgagtgcatttatgttgttgtgaaggactgtgcccggtgtgaggaggccttctctctcaacgaacttaaagtatgaagggtactggtctgcaggagagatccaaccattaccgatcagcaaacccttaatcggccactgtgtgcctccgttctctgcaacgcccttgttgcgatcttgaatggcctttgcaatatatggaatgtgctggccggcatacgattcacccgcaaaatatagctataacacagttagagctttaatcaatgtaggggacaaggcaaacgtacgtcatcgttcgcatactcggggaatagctcaaagaacttttccaagaagataatgaagtgagcggccatctcgtcaagctcatggagatagctattggtgttcgcatagctgaaaccggtaccgaccgggttatccacgaagagcaggttggcaaactcatcccacctgccctcgttatacttcaaggtatggtcgtcctgaagtcggtagggcccaacttccatcaatgcgccatccatagagctacatcctgggccaccattcagccaaatgacagtgcgctgtcggttcgcgatatgacgattctggaaatgccaaaagaacaggttgccgttgatggccggatcgacctcgatatgtctaaagtcgtcgtattagaaaagatatacgtccgaagaaatccaacttccaggagactcacccagcatgcatcttcaagaaagggccctccggcgccccgggtaacgagtgcacataataatccgcagccgaactggccgacaccaacgggctcaagagcagcgataatgcggataataacatcgcgacagtaccacccttcacagaagaagggaggaagggtattgagagcatttagcagtccggtgtgggtatcatcagactagaggtttaggtaactagatagtcaagtagagatgtcccgggagggactcgtaggcgcaaatcaacagatcatcgaatccagacgggtcggacggcacaaggggataggagaggagagggtgcacaaagaagtagcaaaacccaaagaaaggagatgttaaggtgttaaggtgttcagagtgtagaatgacggagttcaaaggaagtccacggctggcgtggcctgtggagtattgagtgtaattaccggtcattaccggtggattggacaaagtgcaccgccacttgctgcttgaatcacggtatttattgtattattcgtacgctgcatatttatttgtcaattgggattattaactgcaaatacgtctccttaagatctatatattttgttatgttcacctctaaatcaaaaagtgcacctcatcgccactggttgaccttattatagtttaattttggggatcttcaactagtaaatcagtgtatcacttagaagaaatcaatagacttgtcggcgtccttcttaataagatccaccatcccctgaatagttagcttcttgtttctctcagcaattcaatagtcttacatcaggcatgataggctgctcattggcgtccttgacatagcggaaaggcatttcggtgcgctcatgctcattgatgagcaattccgggtagtcgacatattgaatgtcctcgagtggtactgggcagaatcagcatccagcacatatattgtccagactgtttactttccacactcacccttctcgtgaacaaccaaacgagtaactcgcacggcagtatcggtggtcatctgcttaggccccaatcggcggccgacatatcccttctttctcaactccgaggtgcgatctaccaagtcgtcagtctctcgccgaagtgcatggagaaaaaagtacatacctctaggcgggtcatcacctgcagatgcagttaacagtcaaagggtcagtctgaactcaatctgtacatatcgcggggtaagagaaaaattccataccgaggataccaccgaacaagaagacctcaaaggtatcaccatcctcaggactcaactcggcctcagcggaggggtctagcaagcagaccttttccttgcggtcggcaaagatctcctcgacactgcgctgctcgacctcgagacccttggtggcggctagatctgcgggcatctgcagctcggcgggcacagagctgaggaggaatcgtgccccgcggtcgtgagattcacgcgcaatgcaggcatattcgagcgtggaccatgggcccagctcgggatccagatgctcgactacgaaggttgggcgagtcatggtgggtgtgggagagagacgtcacagaagcggaaaaaatgaagaaatgaagaagttctcaaggttcggttccactgtgggcaggtgacgaggttataattgatttaaccaatgatactattgtatcaagatgagcctggggagggtcatgggaagatttaggatgtagaaggttgttaaatacaatattaatgagtttagtatatgtgcgagcccaccacgaagtgtagtacatgtgcagtaatttatatagcatccaatagtacccagagtaaactagaggtatattctcactataacatatgatttaattgcttcgcgtcgctgcgcaatcataatacacattatacattctattaaaacaaaataatgcgcagttatccagggaggtaaagtcccagaacgtcatctacctacatagccaatagtggccaatggccatctccgatccgtcacctctctgggatttatttaaaaaactatcctattactgctagtctcttctctattatttgttattctttaacctattatttctctataagtcccgtctcaccctctttgccggtcacacatcaacttctccccgccttatctttcccgcttcaatttcccctccacttcaacttctacttcaactttcttcaaccatccatcatgaatccccaccagcagaacaaagtggacatcaacgtaagtacttctattgttattatcatatctttactcacaattccctagtcgttgagcccagaggagcagcgtctgctgcgcctctacggcaagatgcccaccaagaaagacgtcctccagaacaagctcaaggcaagcccaacacagcctaaccccaccaaacaacaccttcctgacatttaattttctatacaggaacgcaaatacttcgattcgggtgactacgctctcagcaaagccggcaaagcctccgacctaggcgtcaccaacatcgggtcacgccacccagtgccggagaacatcccgcacctaatctcaacctcaccaggccacaacaactctgtcagcaatggaagtgtgagctcccagggcgggcagattcccggcagcatcagcggacaccctggctcggtcgggttccaaagccgcagcccgatcaaggaggggggtagctacctacaccgtggtactagtatcagtgagggtgaggcaggctctggtctggcctctgaaccagtgcagagtgagcaggagcttagtgttagcccccctcccgcgagagagggtgttcctatccgtcgataggcgatgacatagtatcttactccactatgggtggctgtggctattctgagaagggcaattgttgcatgcatatcttttgaagggggtctgtgatttcacgttcaaaagcctggcgctatgggaatttctttgtctttttgttgtctttttttcttcttttttttccctttccaaatgtcttttgtgaatgaggggacaggataggggtgcactgcgggacagagcaagagtgagaacagaggcagtgcgtggacttgtgatggtttcaatgatatgactgatgggagtgggaattcactgcccagtcaatcgagcattgcttcgcttttcggtgtcttggctttttatttttctccaattaccatcatttatcaacttatcaccaatctgtggcattcggggtttttcctcttttccttgatctttgctctcctttttcatatctagttcatacgacatgacccttgtttgtgataatttccttgcaccacttcttgatttcattcttgcgagtgataatttgtgtacattgtattcctaatggactatcgtgttatgtgcataacgatacttccattgttttggcttgttatactatccaatttgttcaaaggttataggttatatacatgaaagtcgtttacacattctacggattgtcttactggcgaatctcccattttctcatctacggtagtgtattatatattgtccaacttggatgctctatgtcgtattaggaactcgtctcttgaactagatcatatcaaggatagaggctatataagcaggctgttctcgtacactacatagaaaatatcgctatatcgctatatagctctattgctgtattcctctatggacagtcaagtatgtcaacatagtggatatttgattcggcataatatactccatatggcacaagtaattaaaaaaagtctaataactggctagatattagcctgtaacattctcatgttctagcgtttctaggccctaaatcagtttagtatagcctaggtagaaagtggtcctccgaccgctagtctagctgtaacacttattaaaaagagatttcctcttttctcatttgaacttctctttcttgtttatttggtttatttgatttagtctattcaattcgattttgtttttttcaggagtttctactttcacttctctccagggctgtcttgcttgacccacgtgaagtgttgtgttgaaagcgataagcttagaggaaaaaaaaaagcaaacagtgtctccccctcaacttctctctcccacatccagctctgaacacgacggttgcttcagatccccccattccttcgatttccttaccgcgtacccaaccctctcggcggtccgatgtggctccttcgagtcttttcgtcggccttgttcctcgccatcaccgtctcctccatcccactagccttcgatgtgggcggcaagacatgtggcctagccttctcactgtccttagcagcattttacttcctggtctcgttgttgaaggtcaccacccctgaccgatcgtggttccgttcctccatcattgccgttctccgctttatacaatgggccgtcatcctggtccttctgatttggtcgctgaatcgattctcggttgatgccgacagtacaggcacaggatgggcggagcgcactttcagcagcaaaagggcgcaggattcttctcttcaggaatggctctttggtcgcgacggcctggtggaaacggtgaccctcggcaactgggatcgacttctgagatggtccaccccggttttccaactggcagagggattctgcagtttgttagtgattcaggccgctggacaaatcacccgctggctcgtcaaccgaggtggacgcagcgatagctggatggtatgttttgatctccccgtgggtgtctcgattaaaaaccaactcttatcctagatcggcctcttggtcttgtccgctacgattatctccagctcagtttacttcctttggcgtgttctgcaattccccgaaatctccaacgtcgatgcggccttgattggagtttccgtcacatgcgccgtcattctgtgtgcctggggtattggaagtggtcgcggtaacccagtcgaaagctccctcctcttcgcctatatcgtgctctgcatctaccagatcttcaccgactaccagccatcgcaccccgtggaacaaatatcctccccttcgcaggtcggagacttccctccactgcctcccatcatcatggcgtcgtacacaaccctgatgcacgcgctgtctcttctgccgtcgattattcacgcaggcttcaacgtcattaccaccgtcttcagtgctgtcacgccctccgtcctcatctcactcgcctaccgcctgctcgtactgtatgcatcgacgcgcatcatcccagctgtccgcgagtcgggggcccgtgccctttcccaggaggcttccattgacgataccgacgcagcaggccaagtgctgggtttcctgagctacttcgcgccgacaattctcatcgctgtctacaccagtctcctcatgcagcactttgcagcaacctcacaagcaatgggtggcagcggtgaatggtggagcacccaaggcaacggcggtggtaacccatggcggtggattaatcttgcttgcacaatatccctatacgcggtcgagctgtggctgggggaaaccaacgatctcgacaacggagtggcaggccactggaaaaccgactgaatgactacttgccagagtcaacgactgctaagtcaacctgcctacgctttccttcttatcattgccccagcaaaagcgcggcaggaaatccaaaggccaatcgaatcggccttcttgcttccttggctgtggtatattactgcacgagcctggtcggccacaagcctaccaagctgacctctcccgcagcaaccttgacaacgaaaacgccactcagcagcgattcaactggaaactcgccatcatcttagctacagctaccgtagaacgagttcttcggaatggtttcgatcgcctgacgccaatcaccggtctcggttcttcgtttcacgtcactccgcccgctcttccttgcttcctcgctaagcattctcaactgccaaacgagtgtatttggttgtctctgtctcgaggcaaacatcactctgttcaacatgccacaacacttttcacgactcgacgataccagataaacctattgctttttcttctttcttctgtgtcttccacacccactttgaattcccactgtttatccgttcggcacttataccctctgctgcctacgctcaactatcccattcacagcttcccggtttctctttcgctcccctcggccgaatcttgctccatctacacgcacgcgcacccactttgactcgaggccattacttgtacataggatacctggttctttcttctattgtatttcttgccaggcgcttggtggggttaatagatattcggttctctttctagatcgaatttgagtgttatagagcggacagttgtagtcttggctgccaccttgggagctgatagtcacatgctagctttcaaccctattaccaagccctacaacccgatatggaatggcagataagaaacctagccagctagagcgcagcaattaatacggaaagcacgtgaatccccactttgaaagggaaaccccatggaactaggccgaattaggaagccttggcactcttaactatggtattatctaagcaaatcaatctgagagcgcaaattacagaggtttacaggtacaaattaatgagctgtgactgttttccctttcattttgaatgctcagattcaataactacttcaaaatggccgaaaacgtagcaaagaagctcaagatctcgtcccccttgattgggacacacaagtgagtgcacctgtaattgctgctcatcctgcccaacctgctcactgatgaaaacagcggtcacttccacgccgacgaggccctcgccgtctacctcctccgcctgctccccacatacgcttcctcccctctcatccgcacgcgcgacccagctgagctagagaaatgccacaccgtcgtcgacgtgggcggcgtgtacgaccccgccattcaccggtatgaccaccaccagcggaccttctcaacaaccttcccgcagcacgccacgaagctctcctccgccggcctggtgtacatgcacttcggcaaggcgatcctcgcccagaagctgtcccttcccgtggagcacgccgacgtagaccttctatacgagaagctgtacacggacttcatcgaagcgattgacgccaacgataacggcatctctgcctacgaccaggccgcgctttccgccgccggtgtcgagaagcgcttcaagaatggcggcatcacgctcgcctcaatggttggcgacatgaacaacccagaccccaccagcccacccggcgagccccaggacgaggacagcctcttcggccgcgccagcacgctcatcggcaacgcgttcgcgcgcaagatgcaccatgcctgcacgtcctggatgcctgcccgcaccaccgtcggcggcgcttacgccgcgcgcaaggacatccacccctctggccgtatcatcgtcctcccgcagggcggcgtgccctggaaggagcacctgtacaacttcgaggctgaggcttcgggaaccaaggagattgaccccgccgtccagacatactatgttttgtaccctgagaacgctaccgagggagccaagtggcgtgtgcagtgcgtttccgtctccgagagcagctttgagtctcgtaagcctctgcctgagtcgtggcgcggtgtccgcgaccaagaccttgatggtgtcatggctgcggaggctgagaagaatggccagagcaagatccccgagggtgcggtctttgttcatgctagtgggttcattggtggtcacaagacgagagagggtgctatggcaatggctgagcgcagccttgagctataggttttggctatttgatgataattaaagtctaaaagaaaaagcgcatatttgatgaaccgttctatattatgatatctcaaggaaactatgatttatttttgacacgaccttttttcttcgcaacgctgggtctttagacgattgtaaataaccaatttggtcttgcatgaaccactggacaccacaagtgtctgtcggctggagtgccaggaggacctttttaatttggtgtcagagatatattagacgagtcttgatatatctggcgcgtcaaattctgactgccaattaagcccggttgtttctccgtggcaaacgagcgagaagcctcggtattcggagggtgtagaaccaagcccaagagaatgagcctcgagcctttctcagcctatctgtatagcgctccaggcattggagcactttcccaaatgttgaccgaagcgagtgttttgttcctaaagaaggactggcctttcgtgctctaatatgagtccatcggtatagtccgggagtggagcgtctggtaggcctaccgatttggtgaagcaatgactagccctcagtgacgaatgctcaatgcactgatatcttcaatgcttccagtgccatctccggtagtcgacatgtcctttggttcagcctgggtggccaggtcctcgcgttcgcccattgcccgttggatgagcttcgccttcgtagcggcgcctttaagacgctcatccacgtcattgacagcttcctccgtattactcatatccagggtagctggatcgacgagttcaagaagcgtctggagattcctggctagtcgagtgctgtgtgatgggagactgggcatgtctttgcagatagacggatcaagggaaagagtatccgttgtgctatctgcctgcgatgcgggaccttcggacgatttcatgtcgagtctctgtgcccagactaatgccttgccgtacaagcggcccatctcgacaaacttctcgaagcctttctcaacggcgaaaacgctgccttcggtatatccggtagctgccccatccgcggtgcccagctcatacccctcattgtagaattgctcctccaaatcaaggagactatctaggagattgggctccatggtggggatagtggaggtagatatgagtcagagttgaggatgtcagatcgatcacgttttttttttgatatgcgcggggcatgtgaccacttgcttattttcccgccttgcccctccaacaaagacattctcctcttcaacaccgcaagatgacggatccgatattgcccaaagccggcgagcggaatatcctcgtgacgagcgctttgccatacgtgaacaatgttccccatctgggtaacgtcgtgggctctgtgctgagtgccgatgtatttgctaggtatgactcaaccccacacagaatatagaattgcgccatgaaactgactgccactcaacagataccacaaggcctgtggccaccgcacattgtacatctgcggtacagatgaatacggaaccgcaaccgagaccaaggcgctggaggaaaaggtgtcgccggaggagctgtgcgccaaatacaacaagatccaccaagatgtgtacaaatggttcaacatcggcttcgaccacttcggtcgcacgcccacggagaagcacaccgagatcgcgcagtcaatcttcatgcgcctgcacgagaacggcttcctcgctgaacgcaccaccgaacagcccttctgcgagcagcacaactcgttccttgctgatcgtttcgtggagggtgaatgcccccgctgccactacgacgatgcccgcggagaccagtgcgacaagtgtggccatctcctcgacccctttgatctcatcaacccccgctgcaagatcgacggtgctgcccccgtccgccgcgagacgaaacacatccacctcctgctcgacaagctccaaccggatatcgaaaaatgggcccaccctgctattgaaaagggtaactggcccaggaattcgcgcgttattaccgagtcctggttgaaggagggcttgaagggccgtggtatcaccagagacttgaagtggggtgttcccgtcccgctggagggatatgagaacaaggttctatacgtgtggtttgaggcttgcatcggctacctttcgatcacagccaactacacagatgagtgggagcagtggtggcgcaacccggaggaggttcagttgtggcagttcctgggcaaggacaacgttcctttccacagcgtgatcttccccggtacacagatcggcacgaaggataagtggacaatgctgcatcaccttagcacaaccgagtacctcaactacgaaggcggcaagttcagcaagtcgcgcggcattggtgtgttcggcacaaacgcccgtgaaaccggtgtcccggccgacgtgtggcgttactacctgctgaagaaccgcccagagactggcgacactcagtttgagtggggacctttcgtggacagcaacaacggcgagcttcttgccaagttaggcaacctggtcaaccgcgtcatcaagcttgtcaccgcctcttacggctccgtcattccagaattcaccgtgccagagtccttcgacccattcctcaaggaagtcaccgaacacctgctccagtaccatgaagaactggaaggtgcgcacctgcgtgccggtgtgcagacagccatgcgcatcgccgaggcgggtaacggactgatccaagcgaaccgactagacaacgcgctgattgcgaacgagcccgagcgtgccgccgccgtcgtcggcacagtgctcaacctgattcttctgctgtccagcgtgttctcgccatacatgccagcaacctcgaagtcgattctggagcagctgaatacacccttcgagtacatccccagtgtggaagagctcaagtccaccggctggaagcctacttcgctgaaggcgggccacaagatcggcaaggcggcttacctgttcacccgtattgatcccaagaaggcggatgagtggcgtgagatgttcggtgggtcacagagcgaccggaagaagaaggaggacgaggctgccaagcaggccgcaaagaaggctgctgctaaggctaagaagaaggagaagaaggagaagggtcgcgctggtgctcccgaaggtgtagaggcgtctgctaagggtggtgcgcagaaggcctccgttacgaccgagggcgaaaatgatgaggcggttgagaagattgctgatggggtggctcaggttactctgcctacctcgtagattgttgggttttcataacatggcgatctggatgataaaatacatgcaaggcgcggtgtgggggcttttctttttatgattatcgatgagatgttgtgcatgggtcatgaacgatgatcatcttctggccatattgaactagcttggggaattcttcttttttataggtatcacgcatggatgcaatgaagatgttttgtttttgatgacctgatcgacgtcttgatgctatatgttccgcctactcgtaactgctcagctctacgatctatctactccgtacagtgagtcacaatccctagtagatccttccaggaaagaaaatagatgggctagcaaaagaattctcatttgcttaatcaaaacacgccggtatggtaagaatttcattacatgctcgttgtagcgatgggatacgaaagtgattagcgagaaaaatccccccatcccacgcaaaaaagaagaagaaaaaaagccgggggccaaatcaacgcttgcgcgtgctcggtctaggctttgtctcatcaggcccgatagggtgcaacatgaccttgttgacagtctgttgggtattggcggagtaacccttgctccagtcgtagctgacggagtaagcgaagatatttccagtacggttgaaagcggtggtagtgatagggcctccgacagcgggataacccttcagacggtgcttcgcatccttatcccagaagtggaaagtgccgtcggcaccagccgtgctgaatgtaccatggatggggtggaaagagatagcgttaacagagtagatattgcagacatcgcggtttgtaggcggggtttcacggtggcacttgaaggagaagttcgaggcggaatccttctcctcgacgtactgaatagcacagcggccctcgaccgagccgacagcgaagcccgaggcatctgaaaagcagctgactacccgcgtctgccacttgagaggtgattgcatggtcttgtagaactttgttggctgatcgaggttgatgatgttgatgtagcggtctgcggtgccgatgacgagcaatttgttcttgacgtccatggtgtagacacgctcttgacactcgacggaggcaattgcggtggactggcgcaaatcccagtatttgactgtcttgtcccacgagccagtgatcaggagtggggatccgcccacggagggattggggatcatatggcagcttcggatgggagcgtcgtgggcggcaacttgagttgtcgtgcctgaaccgagatcgagcatgcgagctgccttgtcggcaccggcaccgacgaccttggttccatcctataagaagaaaaaagacaatgttagtttctgtgtatgggaactgggctgtgggggaaatacgccgggatggcgagaacgggggtcagcttactggagaccagcagcagttcagaactggagcttcgtgctcgaagagtgcctttccttcactttgcccttggtcgttgatttcgtagatgcggactttcttatcccacgaggccacggccaggtgttcgctagtaggcgagaagcggagatccgagatgccatcctcggggggagtattaagggcgacgtccttagaaatgtcgccggtggtatttgtctggcccgccgaggccgacgacgcgccggcgccgaaaagtgacatttgaaagggcgcgagaggtgtgatatggtaaaggggtatcgagggcgggatgaaaggatgtgagctgaaaacaaagctgaagtcacagctgccaagtcatgcagaagagaaagaaagtccaattcggtagagaaaggaggagacagagaagtcgattgatattgtagctcgccagaaagcgatgcgcgatgatggcagaaaatatatcccaccgccttcgtgcctgtagattttatacttcactcgagggttcttcttttgatcccaattttgtatttgaatttgaatcactctgaacttacatatatatatgtacgcctattctcttaacagaactatagccatgcctatctatccatggatgccatgagtcacgactaccaaggcagcattgccggactgcagttatccgtttggaaaatattttgttagacgatctgattggatgaggctttactcaatggtcgtacttgaggcaactaaaaggataagatttgattcgatcttcactttctaggcattgccgtgtcagtctatacttatcgtatatattaacttgataccgactaggaactatctttaggaagatctataagaagtacttaaactagcgagcgactattcagcttattatactctgctgccgagtcatctttagtaaacaactgtatgcatccataattcacaactattttactaagccaaaaaggacaagaggatatggatatgctggttcacggaccacttatgaattatgaattatgtctttatatctttctagttgttagaaactgtttctgccttgggttgataggacctgctcccaccttgtttgatctccttctctctctcctagcgaacacacaccatacatggggttcctttttcatcactcatccaagagattgttgagattgttgatatatgagtaacatgtctcactatccgacgaatacatgcaatattcaccatgtagatactttggtcaactaggctgcaaatacagtttacaggacattcgagatcggcatgatgaaataatggtcaattaataacgccatagaggaagaaagcttaattacgagcaaccttagaagctcagttgagtttgctggtttgccaccatgttggaatacaaaatggacgtgcattatgccgttaagaatggcctagagtggtcagtttcaccgatgtaggatgatttcaaagtggagatgaaggaatggtatgattgaatttgtagttatagtcaggcgatctcatcatatgattaataaaatctagtcatagagtgtcgtataggtacgtatataagtactaatgtggtagttctagcctaccaccagcacatacgtactcctcttcgtacatataagagtgatctgccctaaataaagtggagccaaatgcggggtgcagcactctgattggctgagagctgatgttgatgtcagttgaaatgatccggggaaggccggtgatattatatttgttttgtagatggtggtagtgaggttgtatagaagagcagagaatagtagagtagagtagagtagagtatagtgtaatatagtatagtgtagtaataatccgtgggagaataatgtgaaacccgctgatacagaggtacttgcttgttatagacaaacaccatataaacagaagtaacatgacatccatgacactgcaccccctctcacacaaccttggtcacctgcctacttcccctctcttcgctccttcttctcttccatctcctgatctttgattcatctcctgattcatctgagagtatattccttatcccatcttgacctttcctgaacttgaccagatacattctgcaaccatgtctgttcctctaaccaaagtcgattctgctatcgctggcttgtctatagccgatgagaagcctgccattaccgagaaggaagtcaagggcaagtcccacaaggagaagcctcacaaggacaagacacacaggcgggcctcatcaacggcagaaggtatctggaatatcaaggaccttggtaagtatccatcaatctcagtaggaaaaccatactgataccgccttagaagagcaaaagctggaactgaccctaccaattgaaacacagaagactgggtggtgggtatctcatctttcctcgcacatagatcagttctcactgacttcggtctaggaaactcaacacctccccatcaactatcgaggacaaggatatcctcaaaatgctcctcgtcactccacccgtcaagaagattgacctccacttcccccttggcctagaggtcaccgctcggaacctcaagggcgtcacaatcaaggacgcattagatgccatctacaaacagttcaagaagaaggtcagtgactctacgatatagaccataaagagtgtatgatgactgacgtgaccccgctaggcggatgacgaacttgacaaaccctacctcgctggcttcgaatgggacaaggaagagtgctggacccggttggtcgtgcatcagaagaaggagggtgcaccacaaccaagcaaaaagtccaagaagaagtccaaggacgaggcatagattggcattagcccatcaacccgggtgtttcatgacatgaacatgaacacagataagtgtccccggatgcccttccaatcccttctgcactttatcccttcacttaccaaccatgataataccgggactattgactcccctcaatctgcaatacgccatttgacttttttgctctgctttttcacagtcccattcggctgctctgtgttcactgcgtttctaatatagaaacaagaactaggagggtacgagggatatttcatattccatctcgtctatcatatttctcttgatcagtcgtttctgcctggcccggcttatgtatctaccctgggtggtgtgccgttcactctttctgacgcctagtggagatcgaatcaaataattttgacaactgtctttttccaatgtagatattgtaagacattatgtagaacccaagttgaggagacaacctgtgattgaagtccaagtggacatgccaagccacactataccggttgacatccacagcttcatatcgacatactatacatgagtatactatagatccatgagaagacggaacagatcctagtcccaaagtgacccccaagacttccgctccctcaaaaaagccttatccgagtacttcggcaccatccccatcctggtatacgccgccttaacattcttcacaacatcacattccaaagtcgaagattccacataataaccccgatctctagcctctcccagacgagtataaaccaccaaatccagatcgcggacgccgaaaatctccaagcccccacgcacccgttcaggaaggaattcctgtccccagaccatctccgtcgcagagtattcatcctgatcccacctgtccccgaagacgagagcttcaaagacgatatccatccgcaagccaccggctgattctttttggtcgtccttcagggagaagattacgaatgtcagctagggttctttgcaagcgggaaaatgatatatagatgtaatgcgaacagatagaaaggtaaatactaggtaactaaatgtatctattacgtgaaaataaagtagagctggacactcaccaacgtttcataaatatacaaatactgtccgccatgcccgacattactccttagtagcgacagtgtatacacgggcggctgctggaccagcatacggcgccagctggcttctggcctgataaatgcatcccatttgcgagggtgcttgaccatatcgaaggtggtgaatgtgagattggaggtcgaggtggaggtgcagggttcatttgtagtgttggtgtcggtatccttcattttaatggtctttccattgctaggaccggattggtggaagattgacgggaaggtctctgctagtagtgggttctgggtctttggtttcttcaatgcattgtcgagaggtcggaagaatagggcccattgtatgggtggcgaggagtcgatgaaattggtccaggcgtggcagattcgggttgcttttgtgaggagggtgcgggtgtccaggttgaggaggattagttcgaagatttcggggatggagagggcgtgagtttgggctgaggttgggggagtggccattgaagtttaagaagaagaggaagaagaagaagaaaatgagctgaagctcagtctgggggattttaggggctctttgttgtcagttgggcacaattgagcctcatcacatgtacacgtgatgatcatttatcttggcgagattatgtggattttggatgtattagatgtgtagatgagcgggcatatttggaattatgtagagacggatgtaatggagtatatacagtggtttaatgaggaagaataaaacattcatttctcatcgagaacggcccgaactcccaaagagaaccaaaacaatctcgtcaagaatcgtaaaaacaagatgggtattaagatgttggttattgagcgtagcaaagatgcgacgggcagcagcctgtgcattagctctgccgaccacattacccgctaaatctggaatgagggtagccaagaccacagtagcctcggcacgactattgaaacgatctgcggctgaacgcggaggggctttgcgaagcacgccgccgggccagagcgtatcgcgagcgagagcaaggtacttgagaagggactcatcctgtaccaggccgcgtgctccctcgcggaccttgcgctctattgtcccgccgaggagctggtgcagaacaacgacgactgcacggccgcgcagccagttgttgccgcggttcagctcgaaggcttcgaggaagagatcacagatgggcttgatgaatggctcgagctcgcggtcttcgaaggcgtttagttccgcttcggcttcggctgctgtgacgacgtcttcggttgcgacgccggattctgggactatcgtgctgatggcttgctgggtggcggcagatatgaggttttggcctgcggtagatagttggtctaggacgccaaagttgccgaggaagtcatccatgccgtctgcgacggagttgtagatgcgtgtgacaaggtctcttgtttcaccctcgttgtcgcgaacggtttccttacggggtaggatggcacgttcagagaggaatgcacgtagatcgcggctgcggcagacctctggcagaaggaggagtttctgcagataggcttcgagagcgagtcgccgtttgtgaaggaactctttctgtagcttcataacgactcgtcgccggggaaattccaagttccggacggaggggtagcgttggcgtagcttttgatgcagatcatggaactcgctgtatcgtcgtgcaacgacccacgatgcggcgggcatttgctcgccggcatttcttttgacctccaccacgtctgaaataactagttagcctggaacaaactgtgcagtatgaacgtctcttacacattgcaaattcacggccatcgtcctcctctttgcctacgacggtagacttgaggctaacggtcgatcgcccaaataagctgttatcgctttcctggagaatgtactgttgccgctgcatttccttgcggtgcatttcacgctggatgctggccttggacttgcgcaggattctcagttccgcggtgttgtttgtcagttctgctttgcgtgtcaatgcttggactacggagtcctgggctgcaagtttgtcgatatctactgagagtgcctcaatcgcctccgttagacccaagtcacctggtgcagcttcgtgcacttcatctgctgggtccttttcatccacgccgtctggttcttcgtattcgtcttcgataaatttctgttgatctggaaataagtcgtcatcaaagaccccaagtcgtgacgcatgatccaccaaaccaagcgatgcgatgcttttcttggttctttcattccggttgtcaaccgaaggagtttcagacaagctgcgcgacgaaggaacaggacggtccgacccgaatagaccagcagcatctcctttgaggtcttcgattctcgcatttttcggctcgttggtaatgatatcattgagtgctgcctccatcgtctcgagaacttggctttggctctggccatcattctcgccattctgcgaatccttgcccaaactatgggtggatgtggccagattgtcagtgtcatagtcgtcatcaaaaagataagcagatcgttctgaatctattgatcgccgtaatgaatcatcatcatcaaataatttccccatgccccgcacatcaccagacgagacagcggctcgtcgaaggtctttggatggtctcaatcccggctgggaactggttctcgacaacaaagggggcagaggtcgcctctcgggagtttcaaaagtgactgctatgggggaggattgccgaactggcgcctgggcagcggatgcttcgtcggacgcaatatacttccagtacagatcagaccccttgaacttcgggtaataagtatcctggagacgctctagaatggcagactgggttgtcaaaaccaccattcgcgcttttcggtattgttccggggtggcgcgctttcctgcactcaggaatgccttgactgctcggcgagactcttcagagacattcagttccggctttgaaaggtaggtttcgctgatgagagctaggtcgtttctgtctgctggcttccatgctaataaagtaggcattggctcatctccaaagtcatcttcaagtgggttgcgcaatccatctacaacaacccagaattgaacaagcgacatcagcttttggcggtccataaactccatgaaataagaaagcccagatgcactgtgcatcacatcaatcagtgacgattcatgtgttctagatggagcctcaggtcgaatgtctagtgctggaggtacatgggagtcctcgccaggtctcgcaagtttcgccactttctgatcaagaacacgttttcctgtttctagacgcttcagatagacctgatcctggccctcgaccacactctcctgcttcaattgactggaaacgagggcgcgaaaacgacgggcatcggagaggttattacatttcctaattgccctcacaaagcgctcaaaggctcgctctgaatcggctggtgacagtcgcgggaatggttgcccacgcttagacctaggtgcaggtgacgcatgctggtctagagcggcgcgcagtttgcgtacagtcttccgatcctgcagagctgtacggccatatgcttccattaattggttccatgtgtctgggtccgacaatgaagtgactatcggaataagcacagcgcatgagatgatttcgcgaatcagaaccgacacaattcgactgtttagcacgctttcggggaatagctgtggtagaaggccaaccgctagcttgcgcaggtactcctgttgaacagtcttttgatcggacgccgaggtcgcaacggcaggatgtaagcgaccttcccggtatttgttcgcaatggccagatcaagctctccagactcggtcacatttcgactgagattgcgtccccgaacagaacgctcggcaatgtcaaattctctgaggtgcgatgtcacgataggaaagatacgcgatacgatcagcgacaccatatcctccgcaaccaacctatcccggaggttttcaagagcgacgcgaatcgttcgatcaacttcattggcaaatatagggttcggactgatacttttgtaccacgatgaaacaaagtctcgagtaataaaagacagaagttcgtcgattccttccgacacgacaaaggactggggatagagtggccggggacggtatcgcgtgctccggcggacattcagcacttcctttcgccattggttaggttttatgaaagccaccgaaacgttcttgaggttgactctgtcattctgatgccggattgtgaatgtgacaattcctaaaagacccacagaagctaggacgacgcccagtgtcaaggcatatcctagataccggaggatcggcagccagcgaaccacaagaccccaggcgatgaatacgccgacacccgccagaactaagtcgcggcgactaagggccattctccccacacttttgtcagagttccacggctcataacgatcactcccgggagcttgggagcgaacagctcggcatagtattatggggcctggttggcggggaagctctcgttggtatttagcgtcctggaatggagtcgacgcttggtggggcaaagttcctaggagtcagaagagataaagacgtgtatagcaactgtaaaggcagtatcaatataacagccaagcaaagagtcgagaaagagacgatcccgtgaccgcgcgggagtgaacgtcatttgtgtttacttaagctgttaatccggggccggcgcccatcaacttcgtctttcccctcttcctcttcctcttcttcttatcttcttcttctattctgttctcttcacttttcctgctttaacggttctctgcgccatggcctctcttacggattttgtcgatttttcctctaagcctttactatgtgagttggcctctttacgggatctcaacaatttgcatgtgattgaccccaacagggtccgccgcgactattgctttcaacccaattttctggaagtgagtgtccatcttagtcgagaaaatttcaatcgcaatggttctgcccaggagtaatagctaacctaaattttctagtattgttgctcgcgcaggttggccgactccatccgaggactgttgcgttcgatcttggctaaccggtgaacagagtaccgtaatcacttcttgacccgccttttcggaggcgcaaaaaatggctgctacttccttgcagtcaccatcttctccctcggaattctccgtgaccatgtctaccaactcgctctagctgaccagcccttctacgctcctgttcaccaaccgattgttggaggtgtcttgtttactatcggttccgtcttggttctctccagcatgtgggctcttggtgtgaccggtacctaccttggcgactacttcggtattctcatggacgcccccgtcaccggattccctttcaacgttaccggctcgccgatgtactggggtagcactttgaacttcctcggtgttgcgctgtaccacggcaaggttgctggtattcttttgacggcccaggtatttgtcctgtactggttcgctcttggctgggaagagtaagtggtcattttgaagcatactataactaaactgaccgtatctagccccttcactgctgagatctacgctaagcgtgagcgtgcgcgtgccaagaagcagtaaacgccatggatgtataccaggattggccgggacattcaacatccacaatccgcacaccaaaagagaggccaggttgctcagccaacttgacacccaaagtctgaggttgcccccgacaagtttccagcgcatggacacatccgaatcttcaacgatgctggacctgtagacgatagacctttgccttgtccttgatactatgagtagaacaggacaaggccccacacgctatgatttccctcacgcgactacaaaagatataattcaatccacccatcgcgccaaacctgaattagtaggcctttttgactcacttgtgattgctgaggatgtacaagacgctttccaaattttgtctttccaagcaaaaacgatatctacagcagacaaaagaatgctcgaaacaattgaataaaagtatttaaatctaatattctagaattattttctcagtgttatataacccagtgtcatcgcctcaatttccaatgtgactacacaatgacccagctactagaggacatgtatgaagaccagggttattccaatctttcagaccatattcatatgatcaagtacgctctactttcttcttcactctcggtcaacctgagtcaatatcttgaaccaagcttcagcaaaatccaagcaaagagtcaattgcgcctgctattttcgccaacatgtacctattaatgcatgttcgacttaaccttccacttgcatttgatctcaggcgatgagtgtgggtgagtgaggaacaaatgagaagtcccttcacagcgtcgactccaacgaaaacaacccagttgactatgaagcgaaccatggctacagtcatcaatttgcacacacatcaaatgcgccagacatgaccttcttggcctcttaggaaggactaaaccaagaaactaccgtggaccataccttgccctatgacaaagacatgtccgcagccgcagatgcatggtggttatgatctcaaggttatgggcacacaggacaaggcttgacctttgagattatgggggacgagagcaacaccagtgatgaggacgaagaaaggcaaaatcaagatagcacgtggacactcaccatgcacgtattgtcttctcttcaagtggacttgcgtgccctactgggatggcccatggacattccagttgttatcttttatgtctggataaatgaaagatctcttgtacatccagaaaccacgtttattatagaaatgagggtatataccgacgccacatgaatcaaagagcccaaagagacagagacagggtagtatgtatgggaatagaccaggacatgacaaccagaaggccaaagatcaaaaagaagaagcaaagaagaacagcactgccaacagcccatccctcactgccgccttcccctccccctcttcccctgcgtccgactctcgtcgacagtctcaatctcatcctcatccgttcccttcttcaattcctcaccctcagctagcccccactgctcacggtcataccagtcctcgccatcactcatctcgccaacgtgtccctcagccttgcaccattccagaacatcacctttcatgcggcaagatctattcagcgaatcgagcatgtgctccaccccgcgcaccgtctcttcctgcttctggatatacgaccagagcaggcggcgggtttcctcggcttcagcggcaggtaggccgaaatttgggtcggggaggatgttgtccgggacgaggaagagggggtgcggtgttgggagtgggaatgctgagtcggaggagagcggggagccgttttcgttttcgtttgggttgactgcgttggcttgcgcgcgcgttgtcattcgccgtagtggttctggtgagccgtcgtgcatttccaggtcatgttctgtgtcgtcgttgggttcggttgtttcgacgggatcggcatctttcgttgtgtctatgtctggtctcccgttggagggtgattttgtgctcgccccggatgcaccgttgtgattggaagtcgagatgttagggtgaggtggcaggtctttaacggtggcatcggtctcttctgacttaagctgcaagccgttcttggtgggttcaccatctgctgggacctcggccatttccacgtcattttgcgttgaaataacctgggcttttgttccgttctgtgccgactgagggtcctgggtggctgttgatgcaggtgcctttgtggtaatacctgtccgaattgtaccctgctgaccggcatatatgctcggttcgttactagcaagcctggggtcgaagatcaagtgatcgtcaggcgtctcgagcacaccgcatggcatccaactgctatcacctagaaactgcctatgcaaactcctggcgcgccagagcaaagcccgttcctggcgaagcttgtgttcgactgccgctgtcattttctccagggcttgcgacgtgtatgcttgggacatagaaggatggatggggagttcggaaggatgctttaggggacatagaagagctagaaagaagaaaagaaacagatcagtcatgaagccacagacagtactcaaaaaaagaagtagaaaatcctactctcaagcgcaatcccagagaacgggttgtcttcagcagccgcggcatcagcctcggaatcttcatcatcttcatcaagctcgtcgccctctgaatcatagcgaatcgggttcggctgaagaatgtagcgcgtatagccagcatgatcgattctctaatcaccggtcaaagttaggataccagcttcgtcttatcgccacagcacccaagtcccgaaataggcaaaccacgcacctgcttgtagtaatcttcggcgttgatgtaacccagtgcaccctcgctcacatacttagcattagcttgcattttgttcccccggttcgttggcgccatgatcggatcgtctggaccattatctggggaagaagtatgttagaaaacaatcctgttgaaaagacagactacttagtttgtaactcaccgtcacgttctctgcgcaaggcccgcttcatgcccgtgatggtatcggcgattaacgccgcttgcgccgtcatatttatggtgtcggtaacgaggctgtcgggttagacaagttgatttgcgcgtttgagggggttcctccagtaaaatgaggatgtggcagtgatctcccgagcagggaaaagtaagaggatgagtatctcgacgctggggcctcaattataacgcagggaccaggggaagtgagctgtaatgtctttgagtgactgtgatgaagctctctggcggcaagacatgcggatcgatcgccgctagccgatttaggaaatccgggttatgtgataagggctgaacacgtgacataccctcatctatgcagagtatgaagctgaagatgtttattttatatacaatatttgctcatatgagacaatccaattcatctacggcatgtctctcagatcccagttatatcattcaatcgtcggcatcagcccataccagaacccccttcttgtccgacctcatatcccccgttggaaggacgcggagcgttttgttgaagtaggtatcaataaccaccagctgtggccgaatccataagccacgcttcgctgcaaacagattaaagaccactgtatgacggctcagcggtacaagctgcacaacggtgctcttcggcccgctaaaggcaaattgctcgctagcttccatgaccaggttgaacgtaaggaagtgggtagaggggttctccagtacgtaattcaaatgaatcaaccctgccatattgctggatggggtagccgatgcaaggactcgaggctcgcccatggggacgacaaatcgggggatatcgaggacggtggttgtgaccgagttctctgcgtcgtcggaggacgcagattcagatgaccgccgacgccaattgacctccaatgcacaggtaagcgcagttggtcgacgatctccgagaaggagcttctggatatcgaggcagaagttggattctcgcaattcttctggtgcaatatgggatgtttctggagtgacaagctcttctgagtgtacctcgcaaatagctcccccgttggcttcgaggagtctcagggacatcttgtcaattacaagcggctctaatgcaaaggaaactaccttggaattgaggcaccacttctggaacaggcctccagggcttggcgcagagccatcctcgagtaagttatcgctaactgcgaagaaattgggccatggctgagggtggattgccggcaagaactcatagttcgcttcaaacggccgaatgaatgatagggccacggtgatattcttcataattggtgtctggatatcagacactaaatggtacacagccgaaacctccaacgtgaaatccgtggcctcctgggtatcggccagcacaattgtaagagttttgttagaagagcgctccagaacacccacagctcgtttcaagtaatgagaaggcccctcagttggggtgctggcgcctgagtcagggggttcggaactagaatcgtcgtcaagccactgtatttcagctgtggattcggtaccgaagagtctgatttcagcggatacatctgcagcttcgtcttcttcattgtgtataccgatctgcagcatcaccctttcattggtataataggtagccttcagattgggagtagtgaggcggatcttgggaggcttaggcatgaccttgcatttgccagtatcacgatccttgcccactcttctgcgggtcacgcccttttgcgtctgctgccaccagaacgattcacgctggcctggctcggtgatcgcataacccaaatcgaattgctcttcttcgatcagcatggtgattgaagcaaccttagcttcaccagcttcgcggggaatacaggtaaggttgaagaccttggtctgggagggccccagagtcaaatctgctataccgaccaatgcggtcagtccaccggccggggattgaatcgcggtatcagggttgctcggctcgcgtagtggaagagttgcgatgcaacatggggttgtagtgtcagcatgctgatcctggtcagactgaaccttcactgggcgaagacatccttcgaaaaccagtttgacttctgagagccggataggggccgatgatttatgagcacacgaggtgatggcaatttgggcctgtagaggttccccaacgttaccattggatttctcgaacaccaacgacgcggtcactttgaagacgggggtcagtgtaatctttgaattttgggcttgcaaacttacaactcgttattacatcctctgcacgaaggataagagaaggtttgggcttttctaaaggtaaaccttcaagactcctgtggatgtcataatgccatgcgggtcttggtttgaaagctatcagaatgaatgttaatactgaaaacgataggcacaagataaatggaattaactcacttttattcagcagctcccagtccactcgcaaaactgtctcgctgtcctgaaccctgagggcactttctctgagcgcccatccgaaattgaccatcagatgccaccaccctgagcggcgccagctaagagtagaccacagcggtcgaagaaggccatgcgcttcagaccaggagccaatacgcatatactcctcggccgcctcaagactcaagctctcaactttccttgtttggtggcgtttcgcgaattcctcgatagcagctttcagcgtattcaatattaggcccgagtggtcgaagccagttcttccctcttggggtgcttcagcataagggccgggaacaagatatgtgtcatataagtaggatttgtttgcgagttgtgagccaggtgattgcccagggggcttgcgatcttccaaaggaatcttccgggcaagcgcacgtcgtatcattgtatgcttcgctgaacggtgtagccagtaaccctcgtggtggagattttcccaaggcctgactctttccccggttggaatcgatttctcgggtaaagtatagatgtctccaggttgttcagaagatatttcgctggagatggacggaatttccgctcggcggataagctgtgccattaccatcgaccaacgcgcctcccaggcctcccatccgtagtttttactcccctttcctctgcgattgacaatatcctttacgcgaattctgtgatcaacccaaagccgagctgcggcagtcgtctgtcccgtccataacaaacaacgtataatccgaatggcaagggcgtcggccaggagacgcgcatcgttgaatcgaggattccagcccgcgatattttcgaaaacttcatgtccaaataaagtgtcatacgcgctctcatagttccgacaggctgcatccatttcttgacgaaactcggcaaaaattccaagcttgaattcataccttacgttccagccttgggacgatagggtttgagatgttccagtcgttggcggtgcagtcggaggagggatgctgcccctatttcgtttacgcctggcatgtttagacagatcacgatagtattcaaccaccgacggttgcagtagagagaagagtgatttcacaaaatcttgcagttccgacgaacttgcgtctggtgggatcacaaatatcgacctgggttcaaggtttgttgaccgccgaatccccgcaatgcggtcatcaatctcgccctcatagccaccttcttctccgtcttctgatatcagaacgaccacaaatcgcgtcttgtacccggaggattgccattcctttttcaagctgttgatctcgatcttgagttgattgtctcgtagcgaattcatattcgggtctaacgagaatggaaagaaattgatcactgctgccggaaccagttcttggtgtttagttacccatagaggggtgagcaagccatctgggaaagttggggaacctggcgacaaaggcgatattggcgagtggaggacatagtgcgagctaggttccgggtgttcattgtcctgatcatcgctgggggtggttggtggtgaggggacaggggggtcagcttttcgtggagggagtctgcatgactgtgttggtgttagcaagtagtccgcagtatgatgttgtggaaccaacaggattggaatcataaagtatcaacgtacgcggccagaacttttgatgcggtaaccgatatttgcagtcgtagtattcccgcttacggtaactctggacttccatggcatctgagagctatcttctagaagaagtaggctccggagctcctccgcaacagccccgctcagatgtgggaagtctgaaaagatatgggtccccttctctgatagcagaggatagctcaaggaagttttagtgtcattttcaggccctgcctccagtcctgagagtaggactaaaggcaggttgtgattgacgtagtcttcggggtaggcgtccattgcgggcaatggcagattcgcagcgcggtcaccacatgtctagaggatagagaagagctggggatttaaggagcaagatataaaaatcccggcgattaatgagactaatgctgaaatatgcttcggagtttcaatgatgttttgggtaagataagacaatggctggggaatactgccatgttgccacgggcggtcaattatgtttacacctatcacaaggatagaagttgacctatgtactagttactccatattattgtgacatacgtagattctacacgcccctatatacataggataatgtccgttgggtacggctttcctctctaggctgccgtcgctttaatgagggcgatcaggcttaggtcaacacaggctcaagtgatctggtgcgtgaagtcatgtgatcgctagtcaccgcttactcacccgcctgtctgatttttcggcattcagcttaccgccatttataccgccttagtgttgaactccctagataaattgtcacgatctatgatagatcgctatgatatgctttatgtttacttgctcgcttactgtttgcatcgtttatctcattagataggttgtttgctagatttctaagtgagaaggttcgaggcttgcaacgtttgcaaagggttagctatttgcgtcaatgccactttctggccatcgcaatgctatatcaacaggctgcttcccactgtgcaacttgcttcttctttgtttcttcatcttcgttatctagttgatgtgcactttcttcttcaagatcgacctagcacctcacataaaccacacttatttatcgtattaactacttcatcgtcaacaactaccaccaccactgtgctattagtgatcctactgtgccaatagtgtttactcaactagtcttcaaccacttcaacaactgctccaaacccagatcagttatcgacctttcgccgtcacctccgtctaagccttctcggcaggtaaccaactctgagccaagccttctcggcaggtaaccaactctgagccaagccttcctatcatggatcagcatacggtactgagcgcgggatcaaccggtctcttttgagcgccgaatccaccaaccttctcaacgatgaggcattgccaagtcaatatctacagctaaacacacggtatgtcttttaggcgcctggcacgattacctcttcttcatttccacctatctaactgagcaaagtgaatatggaaagcggtgggaagtgagaagtgactttaagtgttgctcccccacccaactttccttcgaccaatcgcactcattcatcatgaccttggtcttgcaacgggggtatacaattacggctgcgcccatccaccattaacaacccatcttgaagcggcccatatcattccatttatacttggatcctttcatggcaaggcagtggatatatatataaagatttgggttaatctaaggcgctactttccagctcttcgcaatatgtccctttacctcagaacagatcaattcggagaagaacgttctgatgctagattctcaaatttatagggaattcggtcaattcagactcatttttgaagcaaccggaattgctcaccaatatcaaatcaagacctttccagataccgctacagggtcaatacaatttttacctagaacacggaagttcaagagttcacaaaagaagttgggtacttccagatcctaaacttctcaaaattaacgcttgcattggaaaatttctacatatgagtggccaggcggaggtaatcgacaaagtcctgggtaattttgaagtctgtggtgggcttgccccgagtggaagcaccaacatcgaagaccttcttgcactaccctcaaaagccaacgaaacgtccgattcgcagaagtgcagagaagcaacgtcctccggagaagcaaggacgcctacgggtgacatttgctgacactgggaataaaccatgggcatactaaattgcataatcggttatcacggtcgcagttacatgttaggccaggtgatggaccggccactatctttagctaaattcttagttctgaattcatcaacagagagattcagtgatattgttctgctgtccttgttttccgtaacagtcacatggggctctagaataatcatggttgacaattatctgttcgaatatatagatccgagatatatatttgtttactattcttcttcgcgttcaatgttggattcgaatttatagtacctggagcatgcatttctaattgggagctgggtatttacttattcagtacatacagactctgcagtattattctaacatgagttgaccagtatcctcgtatagcctgttaagcctattaagggggtcctccaaaaggagccatttggaatccacgtggaacctcaaatacttagacctccatagctgtgaggaatctaatatatccataaatacacagtgtctgaggtagttattgatattctactccctactccgtagtcccctacttatatatcttctatcggcaaattaagatcctcagtggagaaaaaggcgtcaacgctaatctccaagaaaataagacaactcccttttccttcccttaactccagtctataatatatttttcgctctctcttttcatactcggtataatcgggatcctttctttaatcttcttacgctcactcccaatccctaatttttttggctatcatcaatatctcactgtaagggggggttgacaaggttacaaggaccagaaacccttatcaaacatctttcgcatgcagtagatcatgcgtgtacccattttaccctgcatccgatccttgaagtttgtctgtcttagggattgcacccttagactattgaacaatgtcgaacgagaaccccgtgcaagcagagtcggccctgcttagtcgtcgtcgccgtcgtaaatcgctgccttcgcgcaatggaactgatccaacctcgcctgaagtcatttcttctctcatttcgtccctttccaccatctccgttcctttaaattcgcactttgacaccatcccgaagatcgacgaatcagacccagcgttgccagaagtaccgcgaaccgcgccaattcactcccttcctccgtctgagcaacatgggtttggaatgagttacggtaactacaagtcagcggtagagcaacccgcgctaccggagaatccatttttacaccccgacgatgcggcctcgtcgcctgtcattcgcatggccagggcacccccgtcaccaaagtcgccccgatcgccgagattcaaacccttcaaaacgactgatccatcatccactcgcccggcttcgagagagtcctatacatctgtgataggcgccccagagccttcttcgttcggaacgatcagcacagagcctggaccccgtctgtcaaccccgagcatcgcttcgaatagttctgcagggcgcgcgaaaagcctaaagagtcaatttagtcaattgaaaaggtcatcacgcgaattactctgcgagaaggatccacacgtcgatcgtctgcgaaagactaccagctacaacgacagtctacgacacaacatcccgcgcagccgagcaagcttgcgctcattgcattccatggccgaggttagagaggaggcgcgtcctgcggacgtcaaggaagagccatacgaagcgaaagtcgccagaactccaccaatcaaagattaccaatcgttccacgataccccggatgctggcactcccggcggaattggaagcggtagaatcatcccaactcgcgactcatctctgcgccatcggaatagccagtcatccacctcaaaaaaacaccggtctgcgcatcatagtcgatactcctccacggctagcaaagagcttaatacagacaatgggacaccgggaacgaacaatgacgcagaacaggtgacccgccggatccaagagttgaaagaccagcaacagaagatcaagaccgagttggaagtgggaaacagccctgaacacccgactaagacgagccccgtgaagcaaacaagggcctcgaaggcaaaggcatcgcgcgttctaggatatgatgtcgaccaggccatgcaggaggaaccaggccgcaaccatccatctttcagcgacagtgcgccttctccaaacgtgatgacggggaaaaatcgcaccgggagccggctaggggcaccaatcacaccgaagtctacccacctaccaccgcagtttcccaagtcacccacggaaaacctggattctgagagagctagatacagacagtctctcgaaccaaacacccatcgccgcaccccatccggtcatctgtctcatgtgtcaaatgggcgcccctcgtacagtaccgaacgaccatccagtgccgattcaattgatctcgctgttgaagactacgtattttcgccgaagctgacccagagagtgatccacccaaccactggccgctccattgccttctctgaagttggccatccgaagggccatgttgtgatttgctgtgtcggcatgggtctcacacgatatctgatggcgttttatgatgagttggctcggacgctcaatctacgactggtcacattggaccgtcctggagttggggagagcggtccacaccagggagacgagccgagcacccctctaagctggccaggtaagcaagactgtcgagacattttaatattgcgctaatcaataatagatgatgttgcaatcgtttgcaactaccttcgagtgaccaagttttccatccttgcccattctgccggcgcaatctacgctcttgcaacagctctccgaattccgcagcatattcgtggccgtatccatctcctagccccatggattcccccatcccagttgtctaacctcggttctaagaaggatcctgcgcctaccaacgcggtcccttactcccaaaagattcttcgtgctctccctacatcctttctcaaagtggctaattcaagctttatgagtgccactagtgccagcattactacaagtttgcccaagtccccgcgacggaccaagcgcaaggttactgctacagaagcttccaatgcgaatgccatccctctagtaccgcctataccttctgttgaaaacaaccagcagacccgagtggacattttgccgaatatcaaaccgttcgcttctaccaccgcttcgtacataaagagtgaaacggctctcgggtctcgcgcaaagtctccagaagatgagggcgaacggcagcgtgactatgatactcgtctcacctacaagatctgggagctggccaccaccaacgccaacccggcggttgatttgctgatctgcctcgagcgtcgccaaacaattgggttccgctacgtggacatcacgcgatcagtggtaatccaccatggtagcaaggacccccgcgttccagtggagaatgtccagtggctcggcaagacgatgcgccgctgcgaggtccggatcctcgaaggcgaaggccacggccttatggcatctgctggtgtcatgggcaatgtcttgactgagattgctaaggagtgggaggactggacgatccttgtccaaggcaaacgccgagccactgtcagccatgctgcacggcctggactctcgattcacacttgatctcccttgtctgccatctttccccttttatccggtgtctttgacataacacttcatcttcagccctggtggctcatctttccctaattgccatcgctctcgtttcgacaggctaagccgcagctggtctgcggcttccactgctctgatccacaccttgaaatcctatcttttatccttaccctttcttactcgtctacacacacctactttcgaggttcatgccctctctatgatttactgtcgacatgggttttgcctttgaacaaacgagcccgtctgatttagcataatacccagtcatgccatatactaatcaatattgataattcaacttgacttgtatagtaaaagaaaaaataagacacgaaaacaagcatatattatttacatcatagctccgccaagcaccggggtgaacccgcaaatcagggatgacatacccttgtctccttgaccccacttctcctgacctgtttagagcttttggtcttgtgattgtgagttttggaagattcaagatcgaatgtgcaagtgtcgaatgtccccaatactctaaactgcaagctctgccgggaacggaggaattcttggcttctgaaacacgtcacgttgtctggaagtcagcttggaccctgacgacttggaacattttggatccagcttttttgaaacaatccacaagccacacagctataagcgcaatccgccatgccttcttcccaacggcggcttcgactgatcgtcgttgtggtcatcgcgcttctttttatggtcttttactacaccgtgcgtcaccggatctcccccttccacactgtttcttcagatatctaatacgacgcaatcggatccacagggtgatgcaagcaaaatccaaaaccaaaagttctatcggtcaaccctcgacgcaatgaaagcgaaagagcaagctaagcaggccaaggcccaagagaaaatccagaatcccgtgcatgcgcccggacagaatggcgctgcgggtgcgggtgcgggtgacaaggtgcctgtcgctgcggccgagaaagctgctgttcctcctgctacagggaatgaagatacggaggagataccgattgcggggaggacgaagatgaccgttcccaagaaggtgaatcaggataagccgtcagaggttcagtcggagatcaagagcgaggaggagaaggagcgagaggaaaaagcgaagagagagcgtgaggagaaagagaggaaagaggccgaggcgacaacagagcttaatgccattctcaagcgggctccaggtatgtttctttcccccgttttccatttctggcccgtatccaataccaacaacatccagtcatcgtattctccaaatcctattgcccctacagcaagaaagccaaggtgatcttgctggagcactactctatcgagccgaagccattcgtggtcgaattggatcagcacccgcttgggccgtatctgcaggccctgctcgcacagagcacgggtcgtcgcactgtgccgaatgtgctcgtgagcggaaagagtataggtggtggagacgatattgcggcattggatcagagcgacgagctggcttcgacgctgcgacaaatgggtgggaaatggatcgtggacgtgtcgcaccaggcggttgagaaatcactatgaggttagtattgtaaaacaagtttcaagttttaatagccatagcccatagccatggcagacaattagggggcatattgttgttgcagctcattgcattgtaacagagtagcgaacttgcgcaggaactccaggcagcttaatatttaccacatgtacctctacttgccaagcacccaacttacacctgtggggcaagtactggtacaatcagcgataaggcgataagctgataaggaaccctaatcgcgctagacccaaaatggccctaagcgacgcacaatcccgtgacatccaatttcgctccaccaccaagtccattcgaattttgaacctccccgacatcgacaatctacacccccggcaaccaccaaaagtcacgtcaagatgcggtacattcactccgaggaacggctgcccattctggacaatggtgagcgaatttctttttttattggaggatggaggaagccgatcgcacacaatacaacttctcttttgaggcacgaaattcaaccacaagcctagcacgacacacgatcaacgtccaacaccaatacggcagaagtaggagggaatattgtgtgggatcggcgactcgcacacctaccagacaattctcgattttgattcttcaaaatcttgaattccacaaaaagaaatgccatcaactaacccaaatctcttttcgctctatagtgaaggtccagattaagtcccgcgtcgtgactgtcgagggtccccgcggcaagctcgtcaaggatctctcccacattgccgttaccttcggccgccccgagcagaacgttatctccatcgagctgcaccacggtgcccgcaagggtgttgctaccctccgtaccgtccgtaccatcattaacaacttgatgatcggcgttacccgtggcttcaagtacaagatgcgttacgtctacgctcacttccccatcaacgtcaacatcgagcccaaccccgagactggtcgtgctattgtggagatccggtatggaaccctggaacctacattctttttcgatatgattttggaatcataccgcgaaaaccaaattaagatgaaattagagctaacgttttgttattagcaacttcctcggtgagaagtacgtccgccgcatcactgcccagcccgatgtcgacatcgctccctccgccaacgttaaggatgagctcatcctcaccggtaactccctcgagggtgtgtcccagtccgccgccgacatccagcagatctgccgtgtccgaaacaaggatatccgtaaggtgagttgacaaacaagcatcttttgggaggacccgtggttctgaatctatactaactattcccagttcttggatggtctttacgtgtcggagaagggcaacattattgaagagtaaatgtgccacttgggaatgcatggggtgtccgggagaggtttctttaatttcgcctacttgcatatagggaagcaaagcgaaatgtcaaaaacaaaacgacccttttgaaattcactgattcccttacgcgaaaacgtctttgtatgtggcatgtagaactgtgcgcccgtggcgattctattacttcattactttaatactatgagtattgagtagagagatatatatgtatttgtcgcggggctgtagctgaagatgaagatccgggggaatctggatcgaggtccaactcttcaacctccaacctccaacagaatcccttcctcagaattgagaccattcattttcataatacatctatccttgactacgtataatacttaatcactcaatccaatactattacaccaaattttaatctccaatccctaagcggaacgtgcgtgacgtcgtaacatgtgaaggcgaataccgggcccgcatgtgcacctctgcctccaccagccacaacgcagacatatccctcgaatgaaaatatggggtcctggtggctcggactgtggaatatagttggggcagtctggaatatgctgcttgacgttgctcagttctggagatatgtgagtgttgtgctgcaatcccagtcggagtgtcttatatgcggaggtctgagccggagatagcaaagacaaaagacgcacaagacataaaacatcggatatagtttctgatctgacctcgagctaacatatatatcctagaaactatcatcatggtggcattccaaatcccctcgagatcgactcttctatacgctagccaacgcgaagagctatgaggattgggaagaggcggcatttgagctggacgagctacagagtaaagatttatggtatgagattaaacagagccctgctcaaaatgcaatataccaaactataatctaaccacctacacaggcgccaaaaccccgtcagccgacactacgactaccgactaatcctcggccgactggaagcactgatgagcgcgcgcgagtcagaagacatcctaacactagtaaacctgctccgatcggggctagtgagaaatttgggaaacataaccagcacgaagttgttcacgcacgcgtacgcaggaaccaagcttctaattgacgattacatcacgcaagtagcgctgtcaatccagtacgtgacatccgtaccaggagcgccgatgcatccgagcgggttcagctcccaagcgaagctggagttgctgcacgatacgcggcaggcgtttggacgtacgacgctgctgctgcagggcgggtctgcgtttgggctgtgtcatcttggtgttgtgaaggcgctgcatttgcagggtttgttaccacggattattacgggcactgccagtggggcgatgattgctgcgcttgtggggattcattctgaggatgagttgttgccgttgcttgatggggaggggattgatctttctgcttttgatacgcggaagatgattaatggtggggtcgaggagagctccgactcgggttgggttgggacgttttatcggaggttgaggagattgatgaaaaaggggtatttgtttgatgttggtgttttggaggaatgtgttcgggctaatgttggggatcttacgttcgaagaggcatacgcgagatcgaagcgcattttgaatatcactgtcgtgacgacggggaaaaacgggacaccgaatctgttgaattacttgactgcgcctaatgtggtatgtatttctccccttctcgttgccagtctcagtgatatctaacaccattcctagcttatctggtctgcggcagtagcatccaacgcctcttcctcctcaggcctctactcacccgtgacgatctactgcaaagatgaaacaggcacaatagtcccttggccacacacacaagatgcagtcttccgaccctggcgacacgtccactacaacgaaggcgaatcccccctctcacggatctcggaactcttcaacgtaaaccacttcgtcgtctcccaagctcgaccatacctagtcccgttccttcggtcagaattgaatctcctagaccgacgacagacaggctggagtaatctctcccgttccacaatgcgactaataatggtcgaactgcgccaccggctccgccagctcgactacctaggcgtgctacctgctccggtgagcagaatccttatcgacgagacaatccccgggccaaacctaactctcgtcccggacttgagtttctgggatctaaggaaactgttccagagtccgacgaaagccggcatcgctgactgggcgcttaagggcgagaggggagtttggccggcgattagtgccctgaaggttcgggaggcgattgagattgagcttgatagggggtatcagcttgttaggcggcgtagaccgagtgatccttctgtttcggtggctattccgaagcaggttaacgctatgaatgagggtgttcctaggcgtaggaggggtggtagtgagaatgacgaggggattctcgctgatcgggagtagtattgggttatagggttattttaagtaatgcatattgtttctatatttgtatctgcatgtaaatggtatacttcgtactcggtatacccaacacgcgtagaactatgtagacctcgatacttggtcatattagggtcattgatccatttaattagtaagaatgaactgcaattacaaaattgtatgcatatctgctatccagggctatacatcaatgcctcgtatacaccacaacctctccccattctcaatcaagagcatccgactcaggcggacccttataatctaccaaatgtcagcataaagatctccagcatccagcatcgtccataaaacttacatttcctcgcataaaccacataccaaaccgcagaaatcgccataaacccgacaaaaacaaccgaagcataattcatcgacacagccgtaaccggcaaagcagtcggcatactaaacagcaccaactcaaacgcaatccaagccaacgcaacaacattaacaaacctcccaacaagacctccacaattccacggcgccttcgcaacctcctcccgaccatgccacagactcaaaaagatcggaatagcataagccgccgcgagcgcaataacgcccacagaaacaaacgcggtaaacgcactcgaactcccgagattaatcaacccaagcaacatctgaatggcggtcaacaaaaccaacgcccaaacggggacgccccagcgctcgtcgacgcgcgcccatagtttcgccagcggaacggcgtcgtcccgggcgacggcccaagtcgcgcgcgaggccgcaacggtaatgctaatcgagcagaagactgtaatgaccaggacgagggagatgaggccgagaccgccggcgtgggagcccattacgcgagccagaatgtaggggagggcttggcctgctggggcgttgatgatgtcctggagtgggggcagggttgcgcagatgggaatgatgaagaataggcctgctgtgccgccgacggggacggagagggctattgcgcggggcacttttactgctgggtctgtgcattcttcggccattgaggagatcattcctattgcggagaaggtgtatgcggctggaaggaggccgatgaagaaggtgaagtttccccagccggcgaaggatttgtcgtagtgggctagggtgtaggatgccgagtggcggcctgtgtctgctttgacggagagggcgattaggatgattattattgtgaggagggtccaggatgcgcagagggtgtcgactaaggggaggtggttatttgcaaagatgcagattgctaaggaggtgaggcagactgcgtagaagattaggaggagttgccagtcggatgctgaccaggttggatggtagattgagactgttgctgagagcatggaggcaaagccgaagtttacggagagcgtgatggtccagttgccgatcagccaaatccaggcattgatgaaggagagggttgttttgttgctgcgagagatttggaaggtccagtagtagggccctgccgaggttggatagcgggaggcgagctcggcgagggagaaggcgatacattggtcgaggaggcagacgactatccagccgatgaagattgagaggggaccgccgccgtagatggccgagaggagagctgagccttcgccgtacgggattgctgctatggcgagggtttggaagaggagggttaggacagagcgattgcgacgtagttcttgcttgtagcctagacggtctagttctaggttctcgattgtgccctttccatgatcttggagggagggaggcgaaggggttatctccttctcgatagacatggtgtcagtagcagggttgctagtgagggcagtccgccgttatcagggtctctatagtaggcaaatgaataggaccaagaaggatatacggaggttatatgccgtgcagtcatatgccgaggtgcaacgaatagcatgtcgtgcaagggccgaagtacagatgtaaacaataccatccgaaaggggaatctcgcattctgcaatcgataaagatatacaatttgtggctggtggaataaaacggtaatgggatatgatttaccgattgggagcttcacatacagagaaaagagaatcaagagaaaagggccgacgttcaacattacaaggcaagataagagaaagcttgacgccaggcctaaccctaaaaagcaactatatccagagggcaaagtactccgcatttgatctgcgagattggcttatttgataggcatctacgaagtggataagacaaaatagaaatgcaatagtttcaaggggaaaagaatagaggtatcaaatagaaaaccaccaaaagaaaaacaaagaaaaaacaaacccctaaaaacgtcgaggaatatcaaacattacgaatagtagcatatggtatatacagggaaccccctacatgggaaaagaacaattacagcgctgtcgatggtcgggcctgggacctgcgcgagtgcatactaagccggtgaccggtggccggtggaccctcagtagcgaacagaggggggatactaaatccatatccctcggtagtagcgctacggttctggggatcgatctcaacacggacggaaacgtcgagtccgccaaacatgccgctcgtacaggtgaacccatcagcggcgctgtgtgccgttccggcattgacttcgcccttgtgcagtggtgcatggccgtctttaggaagacgctccagtttcacggaattggattcgaggacaccggtgttaccgggccctggggcgacgacctcggtgaggatggcgtagttgcgggatggcatggtgactttgttccaggcggcgcccttctcctggccgccaggctgcttgtcgaagaaaggcatgagagtctcatcgcattcatggtcgaggtggtggattttgtttctacgagcgaggaggttggcgacggcctggggtgggggcttgtttgtgatagcgctgctgacgacgttgacgatgaagcggtgatcattttcgcctgcaaggttaagtttcgggttggagtagaagcggccgatggcggcaaggtggacgtcgccgccgagaatggttacccgcacgctgttgctgcgggcgaactcctgcaggcggtggactagcatcttgcgctcgtgcttgtgctggcgcgcggtgtagtggtcatccagatcgtcgagtagatccacttggccgtcgaattcattgaagaggccgcctgccaagccgaatcgcttgttcagtagtcggatcggcgcgatcaagggagacgtgaggatgttctcgagccatgctagacgggggtatgcgatcgggacgcctagtaatactatcagatgcttgatgtcgccgtcggcggcgacgatctcgcgctgcagccgttcgaaaatcatatcgtaggtgtcctcgtagttgacctggtgacgggtgcgctctgttcgcgcatctagacctataaaggcaatgcgcttgccaaagcgcatgtagagacttcggctgctctcttccacgtaaggaccgggccgtttgccgatgatccagctgtcgtcctcgacctggttctgcagaacgtaggtattctctacttgacgcgggtcaacacccgaagttccattgacggcatgcatagtctgcggggaatcggtagtgaaagtcgacataggaggggcaatgtggtgctggaagagacagtaatatttgaaagcgacaccgccgataccacggaagacagcacacttcataaaatgatccgtgtatgagccgaacccatcaataatatcatgatcatcccagatattgacctgaggaatgcggccattggcagagcggaatggctcagtgttgtaccagcggacatagttggcatagtagtagtcatcgcaatcagcgcgcatctgattattgaagtcatggttgcgcctcttatgcgggttcgcaatcgcagtccaaggcttgagcgggccatccacacgaacgccgtcattgtaaatctggtcaccaccgccaaccataacgtggaatggcctctcgccatgcaggcgcatcacatcgttccatagatttggccctacccaggcgttcatgtccgtgccgacggaaaagccattgcacgagtggaacatggtacgcatggactgctcttctgcaggaacgacaaattcccacggtgccgggacctggactccggactcgttgtatagaccagggatgtcgtacgcccaacgcgcctcgaatgcggccaccggcacggtaagcgagaatcgccagaaagctttcaggggatcctcgtagagcttgagaccttcgattgtttggtttgttggaaccctgtcggtgccgctctgggcctcaatatccacggcgcctacctggcgcaggcgcagctggggctgctcctgggttggcttggtgacaatcaagatactgccgtgccaggtggttgtagcctggtagtgcatgttcttcaggttgatcaggggaccggatatgagctcgaagcgatcgttcgagccgcgcgtggtctgttgtcccgtctccccattttgaggcatccctgcgattgccgacatgcttcgattagctttgcgcgactttccgattgaggactggggttccgcgacataccgttgacaggctgcgcactgtactcggccataataataatagaaattgatgcgatttggatatcaccggattgtagaggagataaataagaacgtcgactgaagtcgcatagattatcaagattcaaaccacaattgagcgaaatgaagggggggtaaacagggatagaaggaaggaactaggcgtacttgaatgctatagggctactaagtacagggctgaaaaggaaaacaagaaacgaagcgagattggaagctgcagatctgtacctttgggcccgctggcttggcaataaaggaggtcgctgctcaaccccgatgaacagccctgacgctgccaagactttccggtaattacctggccaatgggagaggagattatgctagccactacccggttgagccacctcgcgccacataagtggtttctggctattcctgattgggtcaggagtggtggcggtgcaattttagctttgatcgggttacataagtgggtttcttctgattttgaaggttttttgttcaagagcatcttccatatgatcaaatatgtacttcgttggtactccctacttaccggatgattacacaggcttctactgcttacatgtcagatttctccctatgtatgaccccgctaaatacgtggcctatcacatccgcttactatttactgatctacatgtggagacatccatacttactatactaacaaccatcttgaactttttgtttatttgcaaatttgaaataatatcaacaaactggatcagaacatccctacacataagacacggtcgcgttcgaagatagaacagaggcaaatgatcaacgtagcactcaccaagatctggatccgcagatttaaccgtgaccattgatgcgagtggcctggaacaatcttaacgggacgaggctcatcgttttcagtcccctcagactcatctcgcagcacaaacatattctgtccatggaacaaaccagaagcaacaaccttcttcaactgcttctggcgatattgctccatattgagtccatcacgaacagcaaaccaagtgtcccgggagccagtcgcaagcaattccctcagttcatcctggaaaggcgtataaagctcacgaagctcatcaggctcctcagccagaagctcagcaaagtcatccacaaactgcaagaactgcagggtaacaaccatatccaaaccagcctggaactcgcgcgtaatgaggccgtagtggtgcaggacgccgatttccagaatctcaatctgatgttccatagtatagcgaacaattgcgaggaaacggtctacgggaacgtcaatcacgagctccccttcaccctggttccagaccttccagagatcctcgtagttctcgatcggggcctcgggctcgaagaaataaccctgcaagcggtcggactgtaggtcgaagccgagtaccaacctggcgttgctgaattcgttctgcatgtcgggaacggggaggctcacgaagattactgttgggtttgtgtgggttgggagattgttaaggactggctcgtcatgtagggtgacttgtgtgaagccggtggtttctaggaggtagcactctttcttacgacggagtttgttgcggccactttcgatatgtaaaaggtagatgtagtagtcgaccacaccccatggatggtgcatgtagcggttcaaatgagatgcgaagcatacttcattgggggttgcaggcctgaagattgttgggctgatatccttgagttgggaatcgttggtgaatgggttagacttaggcctcatcaatttagagggaataatgcaggtcatctcatcggcgagctgagagagctgggggctctgcatggctgttataatttcaagccttgattgtcctggttgtcagactagtatctcctcggttgtaggatttgacgaatgagttgattcgagactcacgatggtcgggacaatctacaatgatggctgtgctcggcgagagcctttcacggaggacagaggcgatctccttgatagaatgatgaatagtgaagattaggcacaggagcaggacaaaactcttgagctccaggcgtgcagagaggatatgggagaagagctcggcgaagaactgcttgctgctttcctcgtatatgtagtaataaaggatgtcgaataggtagaaagcgacggctgcttcaaccacctgtatgatacagtgaacaagcacgaaagtcacagatccaaagcacagcacgaacccaaagcacaggagaaacaatatccactcggtatgtgtagaaaggtcctggaagaagttagtaaaggccataataggcgctcgcaatagggggcagcttacaatgtagagtactgtttatgtgcagtgtgttgaagtatgaagctatgggtggcgttgatagtcaattaacttgtgcttctgttaatttgctgtgttgagatggctgtatagaattctgtctcgattcgtagagaggaggtttccttttgtacactggatgaaaaggccgtggacaagtgatatgtgtctccaccgaaagaaaacaagagcacaaaggcatcctaaagatattcttctaaagccctcaaaggaaatctccttcgagatttgacaggagtagaagatacaaagagcataaaggcattcgccgacaaagttcttgtcgggagggttccttttgtcaagtactctatattatttgacttggtatcctaccagtaatgcccttgtttgttctttatcaccgagtatcaaagggaagagaagcccagggagttgtctttgtgaaacacgaatcaagtgtacaaagactcgatccaatatcataagagtagccgcggccggcctttcaatgtataaccggggataagataaagtaccccatatcagccagatcaacgtttaatcagctaggatagcattaggtcttttgtcgagaaatcaagagtgtcacgtagacatagactcggttcagggcctgtaaactcgatcaaagaagagacaaggccattctattctggaaataaagaggctttgttcctagccaagactgagtttcattgtgtattagatgttcgcaatatagataccttatcagtcttacatgccaggcatcacctagcaaatatttccttcaccgggaaccaccagaatctatgtcctcacaagcaaaggccaagtcccccaagtctcattcaatccagcaacccattccaccgaacatgggacaggacagtgtattccttgtgcggtctgattatttagagagttttgacgatgaaccctgggtcgacgtaggttctcagttcttggaggatccggacaacgaggaagctgactgggtcaccgtaattcttcccgaagaaatgaacaagacccatagcgacgaagatatcatgaagtatgtgctacataacatccgaattagacgagccgtcgtgagccaagtggcactgcataatatgggagtgacttgtatttcgatcccgatcccggtcagcactgttgatactgctacaatcttgatttgcgccgaggccgacggaaacaggtggctagaaatgatttctaatggaatggctacgcttcgcagagaggtgatttttggacgtcggtgatctgtgggctgaatagagagaggttgactgattagctatattgtcgataccagggaggtagccaagtaggaactaaggattgttgtccggcagactctgagaattgtgtctagaatatcaaatcttgtccaaatggtcaaaggtgtcgaagggatcgcagtagctagacgagagttctagtaagtccatccaagtactgaatacctaagtaaccaaataaatcatatacaatcctcaagtaccaagtacctatatgtgccttccttttttgggttccttgttaccccagttccccactgaaaagtattctgattgcatttcattcatagctgtggccatggaataaaccgtaacaaccttggctttcttgctcctcaaagaaattctttgttcgtagttattttgggtaaataatagaatcatagctgtggctttgaaggtcatcatagtcgacagaggatttctccattaattctcttttttaatccaggtgtcctccatataaaaaggcctcggttctctcccgagtgattcgatttggacactattactttcaaccatatacaacaaacaattgttcaaagctcacactgaccaccgacaatatgccacgcgaatatgagccaaatccatttcaatatcactctaggagcagtatacaaggcaagtctctgtttaggtcagccacaacaggcaagttaatagacgactgtgaaagcaacgagacttcatgggtgactgtgagcctccccttcaggatgaattccacccataccgatgaaagactattagaatttgcgattcacgagatccggaggtaccgtgctattgtttaccaaataccgcagcatgcgattaggcatgagtgtatctcgttcgctgtagatatcaatgaggcaggggtgtccctggaacaagtgactcgtgcgtttatggctcaggctgaggttgtcgcgagatactggctgagggagctgcgtgccggtagggtcactcttgaccgagaccgtattttttgtgttgggctttttgatgcacattatgacagggaaacgcgcaactagtatagcattcgatggtctgtaaccaaagaccatgtttagattggaagtatgtactctcgatttcatggaattcaaaatgatattctttctcacatcagtatgacaccgaaattgttatttgaatattcatcagtcacagttgaaatttgtgtagtatcattgtatccctagccccgttagtatgcatgcgatgcgctgaaggagacatcgagggggggattcactacgagcggacccggttgacaggccgtatgttgcacagctgaagacagtagtcatacctgggatatagtagtggcctgtatgtcaattacatttgagtttggaaatgtttggttagaattagatggaggtttagatggttggtaaaactatatatagtacaatgactatgtctctatcaaagaccaaagtcatcggaagaatgaagaaagccattgtaacaatggaaggcctttgttaattctcatacgatactccagatagctcgcatctcaactgtaaccttataagccctcggtgtcctctatctcaccggcatcacccagaaaagcattatcctatcgccaacgaaaaagaacaagaagacctcatcaaggagacagtgagtcctcccagtctcactcaagcccgctaaccaccaagatgtcaagcaaattccagccaagcgtatacaagagcacgaatgggcaatatttcgccgagcccgccggtgaccgaagcgactactactggatcaccgtatatttctccgaaaacatcgatcaccgtgggattccagattcagaaattatgctgtatgtaagggatatgattgaaaagggccgcttcactgtagacgatcagtcaatgcatggtctagggaaaaagtgtctctcgatccctatcaagcgggatccggatacccctctgcctaagtcatggacggcggatcctacacatcccgatctccttcttgctcagaatcttgcagggtattggaaggatcagatcgcgtttaagaaggttactctggatcaacggatgatttttgttgagactcgtcgtaagatagtgagtatagaagatatgttagatgtgggagttactctgatggatccctggcgaatttaaagcgttctttgtctgtgttttcgtgttgaggtccagttcttttgatttggatgtttcagcaatcaatgcaatgcgttttcctgctttgtttatacttgtcacttgatagctgccagaaatggagaaagaagataaaataagatagatctttctttctaattgttactgaaagccattattatgaatgatataatctcttttcataaaggcgaataaaatacccgaagggacagcaagaacaagaccaaacaagagtatacagataacattatacattctgaaagaacagggaggcattataactatgaaaggatttcattctctcattgtacgctgccagaatagccggatcgtccctcagaatataaacctcggcgtcctcgcctggagtaccatcacagtgcatttccacaaaaagagccctcattcactccaatcgccacaatgccttttctacaagcgagtgtgttccagtcaagccagctcgagcatggccaccaattccacttcaaggacccccacaacagccaaccaggttggctctgggggactgtgactcttccggataccatgggccttggaaccagtgacaaggagattatagtacatatatgtgagaccatcgcagcaggcttggttacttggagcgatagtgcgatgcacggcttgggcaaatactgcatctcgtttccgatcaagttggaaacacccaagcaggacttgaaaaggctgatgattcaggttgagtacgcggcactgtggtgggtgagtttcatccgcgcggagactgtttctattgacaagcacatgcttttccgggcccgtcagccgcccccggatcgtgaggatcaacttttggatgtgcctttccattgggataagcctgactacacggctctgaatccgtggtctgtagtcactgtgctacggtagatcgtggggattgattggtgaagatgactggggtatctgattgggcttggtaggttgatatttcgaatggaacaatgagtgagaagatatagtaacccaagtgaatgagtagtaataatagaatttgccgcaataacgccagtatgatacaactggaacctacagataggttaccaggtctctattgatgagactttagatccaccgtgactgtctcgcccttctctcacgctctttcattttctgcatgagggtatatccacatccggcaccagtcatatacccacctagatgggcagcgtgatccatcttggtcagtcgggagaggggccaagcgcggaataagaacgcgggagctaccaagctgaagacctcggtgccgatcaggcaggtaaggaagacccagccgtatgcccagatctgttcttggagcccttgaggaagaatccacatggtgagtttgtcactaggaggggtcagtataggtactatatagaataacagccagataaatggcgggagacatacttgaagtggaacatgcaccatgcggcgacgataccgctggttgcggcactggctccaagggatgtcatacccaggcggccgaggatgacactgcgtgtcaatgaaaagacagatcccatgatacccgaagcgaaatagatggccaaaaagtttccgcggccgatttcatcgtggactgtagagcagaaaaagttagaatccatattttctagtgcttctccttgtcacaatgcatacctctggtccccataagtcccaggaccatcatattagttccaagatgtctccatgtctgatgactgaaagcgcttccaatcatgccaagtgagctaggatagaagggaacaatcacgaagtaacggttgagcagtttccacgcgggaggtacatatttccatagcaaagtgactgctaagttagctgccacaatggcacccacagtagccacagcaggaggcacatccggcatgaggcgatcctttcgtgctgggaactcatatctctgagcaaaagtatagcaaagagcaagaaccacgagcgagaacagaagcggagcgagtagacgctgagcctgccagttcaaatatggttaacaactaaacaactccacagagtgaaccatccttacattggtgatattcatcgattcagggctctcgttggtagcggcaatatgatgcttctggacccaagcgagatacggcctttcgataggatccgcacggggacgagctaaacatatcagcaccaatacctcacttagactcgaatcttcgtatacataccctcagtgagcgcagcttcctggtactgctgcaaggaaaggttcttcccaaactcccgcttcaaccgttcgtgttcttctttttcgccatcgagccactcctgccttttccgttcctgttcagccagcaagcgcttctcgttcctttcgcgagcctctttcaaaatactcttgccgtaaggagaaccctcctcgccaagctcggcgtcataagaaccgctttgcggcttatacaaacctagcttttcagcgcggcgcatgagtttctcttccgccgcacgatcctcacgttcaatacgggcaaagatagcagcatcctcgtcgacggggtactcatcgcggagccattccaaagcagtatcaaactgctgcttggtgatcgagcgggcaatgtcaactggcaagtccgcatcgagcgtgccagtcagacggtggccgtgtaggacagccaagatacggtttcccagctttgcattgaacttgacggggccaaatatggccttgatctcggcatcagagaagggcttttggcgggggagaacctccgagggatccgatttggccttgggcttgggagatgcggcggacgtacgtttgaagcggcggggggtagagaccaagttgagtcgttggggagatattggggttggagttggtcgggacgggcgagagaatagttgggacagaaggttcggaattggtagcatggattggcgcgatgtactgtacatgcgccatggggcaatgcggagatcgcgactggcaggccggaatgttactggcagcacggaggtgcggagccctgggcatggagcccgccatacggcccagaccacattgctcatatcctgtgactagagcgagggctcagagaggaccatggaatagagggtgatggtggattgttcggggttctttttggcggcatcaatggaccgcacggctgcagagttgttccgagaccgcgattacaacaggtatagagcgaaaagatggagaaatgatagtgagttcttgaatatgctttgttttttaagatattactagtgtgaactatagtatcagatgttctacctaggtatcccatccctaatgcaccactaactagtcaaaatcaatcttaactgacatccatctctgatctataaaacgcacgtgatgataacagataaatgataataaacggccctggagatcatgcatcatgcattgatttcatctctctttcaccactcaccaaagaaacttcaaatgtcgacccaatccctccctatcactccgggcgcctttgccgaagcaattaaagagcttcccctcgcagtcctctacagcaaagtctccgagatcacaaactccatcgcacacctgaagcgatctaatgctgagattcgtgcatacatagcagaaagcaacgattcagaggaagacaagaaggacctggagtgtcatgccactgaaaatgaggccgtgatggtgtccatgaatgagcggatcatgttactgaagaccgaggtcgagaatcgtggacagccttggattgagcttgatgagcttaagaccgacaaggaacaggacactctggcagatgtaccagtgacaaatgggaatgtgactgagactggagctggagctggagctggagctggagctggagctgacggtgcaggagaggagtccaatgatgggggggatcaggatggggtccatctgtgactaattcggtgcgttagttatctgtgtagtcggcttctttaagctggtctggattttgctaatcttcaaaagcattgtcaccagtctgccagtggtactcggttctattatttgcgggcgctttactgcatttgcgtgtgggtcgaagatcggcttatggcaattggctatgtttcactaactagctagtagtgtccattcttcacagtgcatacgatgtgacgcctgaatcatggctaagagacggttatcccaagtacgtttccccaagccttcggaaccgtccgcgtcttctgtagccctatgcaatcgagtcaccaggtctagacaacatggaatacgtctagtgaattgttcacaaccccaagtgtcattatggaattatgatcagatgactttattgcaatgaaaatattaaaaacaagcaatgaccaactgatgctgaatgaagatatgcaagatcatcaagtagaataattcacagcgcatgctaaatcaaagccccggctatgtcatatcattgcaaattcgcccatttttttaaatggcaggagaaagcagaatactaacaaggtaatacagcgcggtccaacgccaggttagcggacatgtcatggtcgtcaaagtaaaaacaaaaaggtgcaactccagaccggtggagcttaagtagcggcctgctgggcccagtggccaccggtgagcgcctctgggggaacccgctgctgcttgatgaacagctcaattaagggctgcataggctccatctccttatcggacacaagcccatagtacttggagacagtcacgaagtgaacgaagcacatgttcaggacatcgtgcttgttaatgtgccaaaaggggttaagccaatgagcgtggtacaaatgggcgtagcagcggaacatctgcttcatgataccctggcagtccttgtaaaaggtttgtgggaagccactggacttgccgatccaatcatctgggttggcggggtcggagggagttgttgatgcgccattggcctctttaatggaagatgtttcaggaatgccatttactttttcggtagggaacataacaggatcatggatcttgctgacgatccatttctcgacgcggttgatgaacttcggcgcggaaattttggcggcgcggccatcaacaagccaggtgtaggtcagcctttgaaatcgtcagccccgtttgaaatttaccccgctatacttcacataccgtccagcggacattgttggacaagtgttctcattgcaaataggtagaccggtcacaccattcacctcctggataacctggagcatgccgtgaagtagacgatattgttcaacaactagagtagagacatattagcatccccgcttccacgttgagcttccatattgcttactctggtgagccagccactcgcccagctccacattcttcgggcaagcacagagggtcaagaagttgcccctcacattcagcggggcatacttctcctggaagaagtatttgggtccctcagggtcgttggcttgagtctccactgacagactactggaaagcgagggcgaatttgacatggtggcttgatgctggggagcagaggcctgtgctgggcttttggggggattgttgctcttgttgcttcctcctcggccaaatccttggcgactgtattcaaagatagagttagcgggcgatcgtggcgaggtacggcagtttgagaatgaagtgggaatatataagaggaagtgtagatgtgaatgacaggagaaggcgccagggaagatattagactttagggaatagaatgctcctttgtatttgtggcgcgccgggggtttcttcgtgcagtatgagggggtaaaggtagcagggagattgaacaacctattgcaacaagtccacgacagcacagcattacttacacgctctggaagaaggtcgccatcttgaaattgatctgcaatgcttcaaatcaagaaaataacaggggatgagggacgagacggtgagatgtccacacgttgaggatccccttttggtctgggccatctagacactagtcctgtttgggtccggggtcggaaaatatatagccccgtgcgtcaattgaattatgagagctccgtcgtaacgatagaacaattgtcaatacaggttgcttactgccagtataatattcaggagtgtcactagtcccttctttaccgtcactcacacttccacacatttatgactttgcaacaacgatagtttccatacaccatgtcctcctccgacgaggccgtccgacgccctagcaatggcaataagagccctgcgcacagcaatgccaatgattctggcgccgaccagatggatgaaggcgatgatctctttggatcggacggagagggtgaactcgatgacattgagtatgcgaaccacaccaaagcgaccagcgctagatactgatatattaccagaccccaccgcaacctggacgacgaacaacttgactccggtgatgatgagaatcgctatgatcggcgcgaagatccaatggaagatgtggcggaggagcagcaggaagtcaatgttgctgaccaggaccttgctcgggctccagtgccgttgaccaacgacggagaggtaggacgagctctaccttgaagctttgatattgatctaacttctggtaacagatctacacaatgcgtgtgccggatttcctctcaattgagggcgaagaattcaaccccgagacttacgtcccaccgccttatcagaccgctgctacctccctatgctggcgtaaagatcctgcggatgagtctcttttacaatccaatgcccgcatcattaaatgggaggatggctccattactcttcaactcgcctccgccccccttgagcaataccgcattgcatctaaacccctcgcacctctcactaaatccggcgactatgaccacaagctggattcccacgtttatctcgcagctggactagaaacagctcaagtcttccgattgacttcacatatcacccaaggtctgactattctcccgaccactttggagacggacgatgccgttcagcgactgcaagaacagttggccgctgctgctcgtggtagcaaacagaccgcagctggcactgcgccgcgctatgaaataacagaggatcccgagttggctggcagacgtgccgaaatgatggaaaaggaagctatcaaggccgagcgtcgtcgccagcagcttgctgatcgtgaggccgaccgcggtcgccgccatggcgctactcgtactggtcctagcggtcttagcgtcggtggtcttgaagatggcggcttgcttacgactcgtccacgtgccaagcctcgccgccaaaaccgccgcggcgagatttacactgatgacgaagaggattaccctcgtggtgctcgtaacaaagaagacgagtacgacgaggacgatggattcttggttggcagcgacgaggagcttgaggaagaagccgaagatgaagaagaggagctggaggatgaagacatggatgccgaaggcgaagatgacgtggagactgcacctgccaaagctgcccgtagcaagccagagcctcaaaccagagctggtacgcctcctgcccgaaagaagaaccgctacgttgtggatgacgaggacgacgagtgagtctgtagcgttctatttttctcctatactcttttcttttcgcgctttcgatgcagttttcttgttacatatccacatggtccggcgtcttctacatggacaggcattcgagggacaatggggctcatttcactctgatttgatgcctgtacaacaaaaattaatgaaatggtcaatgacatatcaagttagcttcgtaccagcgaagcaacgtagatttgtatcatctgatgccgaatggtatatacatatgaaataataactccacataatctcggacatattcgaagtgctctaattagccagatatttcatgcattatgagcccccgtgtgcgctttgttcctcgcagtgacaggctcaacgccctcgggatattctgaaggatcaaagttgaattttttgatcacatccctggcacttccaaccacacgaagacataaaaactccttttcactagaatcctcttgatcttgtgactgagccggctctggtatagacattgagttccactgtcggcttggatgttgcccaggctcatgccagcggcgttgccgattttcgatttccataatcatagacagcagatctggctgctgagaacagacaataatggcacctggctcaacgggaccaccaatgacagcgcgacgaacaacttggtggagccacgatttccaaacttgtgctgggtcagggctttggagtacctcagacacgtactgtggaggcgcggactgcatccccagttcaacagggtcggtttgcgcaacgcgaagccatgagtccgcgacaacggttaatagagttcctataaacatgatattttggaggcccgttgagaagatcttgggacaaacttgacagcggatcacgttccgtgctgttcgtgcagcaatatatagcgagcataaagtgtgggagttgactgggaaggaggaaatggatgtcatgtggctaagggataggtagaggtatgataaacacggacacccagacgctgtggagtcggaggaaactgaggtggcaggagatagcggcgtggaagggaaagctggagggttggggaatggcattggcatggccgtggcttcggagatggccgagaaatcaggccaaggagaagatgatgcgggaacaggaaggtttgactgttttggacggtctggcctacacatatggttgtggtcttcataacctgacaatagatttgcggactggcactgtggcaaattcatgttcgtaccaggccgccagaataactgcggacaaagatgatcggtgtctgggaaggagactgtgtttggactcatccctaatgaagattgttgcaagtcctctgggctgggccaaatttcagttccagatagccctgggaattcgaccccctcatcgtctgttctcgtccttttcttgggtggccggcccatctgtttttgtatggaatagttgcacgagagtgactgtttgatgcatcgcgaacagcctgctggttctccggagcatttgagcttccgttttcctgtcgaacagtaaactggtcagtgagggttatattacatcggcctgtgagacttactacactcgtcgcatgctgcatgtctttttggttctgacaaatcattcggggtaggcaaagaagcctctccctcatactcagtcgggagtgacatcttaaaaaatcgaagatcaacagagcccttcaataaaacattctaatgttgggctaggtcatagatagactcgataagatgggggcggtcatgtgggcggtgagcggcgaggcccgagaaattatcctaaaaaaaaaactatggatctaccgcaacaagacaacacccgctgaacggcatcatgaaccccaaggcggcttcaaaaaagcgcaaggctgtcactcgagatgtcgaggaggaagccggtgtcttttccggtgacgaattgagcaaaggcaacctcgatggagccttgtcggacaactctaaggatctttcggacaacgaagacgacgacagcgactcggaagtcgaacttgtcgacgatttcagcgagtcagaagatggagaagaggaattggacagtgatgagatcccctctgatacagaggacatcaagccagctgctggtgaacccaacttccgcattgtgaaggacgccaacggaaacgatcgttacctctgggatgaaattcacccggacgacaattctgaactctccgaggtggatgaaaatgctaacaccattggcgacattccactgaagttctacgacgaatatcctcacattggttatgacatcaatggaaagaagattatgcgtcctgctaagggcgaggccttggatgcgttgttggacagcattgaaatccctaagggctggactggcttgactgaccctaaaaccggcaagcctttgcagctcagccaagaggaattagagttgcttcgcaaggtgcagatgaacgaggttccctccgagggctacgacccatatgagcctttggtggaatggttcaccagcgaacaggagatcatgccactgagcgccgccccggagcctaagcgccgtttcgtaccatccaagcacgagcagaagcgtgtgatgaagctagtgaaggccattcgcgagggccgcattcttccttacaaggcaccagaggatagggaagacaaggaagaggaactcatcaactacgacctgtgggctgatgaagttgagcgacctgaccacgtcatgcacatcccggcgcccaaactccctccccctggttacgaggagagttaccacccgcctgctgagtacctgcccgataacaaggaacgcaaggaatgggagcagacagatcctgaggatcgcgagaaggatttccttcccaaggactttggctccctgcgcagagttcctggatacgacaacttcgtccaggagaagtttgagcgttgcttggatctttaccttgctccacgtgtgcgccgtagcaagctgaacatcgaccccgagagtctcttgcccaagctccccagcccggaggaactcaagcctttccccactgcttgtgccacagtctaccgcggccacaagggccgtgtgcgctctgtcaacgtcgacccaactggtatctggctggccactggtggcgacgacggtactgtccgtgtctgggagctcctgacaggtcgccagttgtggagcgtgaagctcagcgacgatgaggcgatcagcacggtccgctggcgtccgggcaaggacgccgttgtcctcgccgccactgcaggagacgatatcttcctcgccgtgcctccgatcgtcaaccccgaaatcgaaaaggccagtctggatctcctcgacgcaggctggggtttcgccgcttcccgaccggcccctagtgcctcagaggagggcaagaagaacacgcccccgacctggatccgtccctcgtccgctctcgtggacgctggtgtgtgtgtcgtaatccccctccgctacgtgcccaagacgatctcctggcaccgccgcggcgactactttgtgacagtctgctcgggcgcctcgacacccgcctctgtcgcaatctccattcacaccctcagcaagcacttgacacaattccccttccgacgccgcctaaagggtggtggtccccctcagaccgcccacttccacccgtcgaaaccgatcctgttcgtcgccaaccagcgctcgatccgcgcttacgatctctcgcgccagctcctcgtcaagatcctgcagcccggtgcacgctggatctcgtcattcgatatccacccgacctcttcgagtgcatccggcggcgacaacatcattatcggctcatacgatcgtcgtctgctttggcacgatctcgacctctctcagcggccctacaagaccctgcgctaccaccgcaaggctatccgtgccgtcaagttcagcagccgctacccactcttcgcagatgcttccgatgatggatccctgcagatcttccacggcagcgttactggagatatgctcagcaatgctactattgtgccgctcaaggttctcaagggtcacaaaattactggcgagctgggtgtcttggatatcgactggcacccgcgcgaggcgtggattgtcagtgctggtgccgatggaacgtgtcgcttgtggatgtaatcttgagatgccgttgcatgatgtctgacatttttctgggcgtttttctctatttattttttttgtgcataatcttccttttgtatagttatcttacaaaaaagttggtcctataaaaatttctacttagtatcatatcagaacagttaggataatccatcgtggctcagtagcggaagggatatagaattaatgatcatgttcagtcaaatagcaaatgttcaaggtatcttatgtccacaatcccaaggaagaaaaaatgggagaaaaaaagaaaaactctctagatctaaatatgtaaagatgtatatcccaagagaagtacatatacaaatcagcctcaaactcaaaccacaccaccactccaatccctcctgagcttctcatacttcctcaagtccgtaacactaggccgaacaaatgacttagcagcaacaaagtcaacgaacttgatactatcgcgacgcttgatagcagagtaaccagcacgacgcaacaaactgcccaaatcagcaccactgaagccctcacactcctcggcgagtttgcgcagatcctcactaaactcaatagacactttccggagaagagtctgcaagatctcgacacgctcgagtggcgtgggcaggttcacaaagagaagggtctcaagacgacccggacgcagcatagcaggatcaataatatcaggccgattagtcgcagcgatgacgtagataccctggcgactactgccgaggccatcaagctccgtgaggagtgtgttgacaacacgggcggaggcctcagagagcgtatcatcacggcgaggcacaagggcgtcgagctcatcgaagaaaataacacagggcactgaggagcgggcgcggacaaagacctggcgaacagcgcgctcagactcaccgacaaacttgttgagcagttcggggcccttgacactgatgaagttcgcgcgggattcattggcgacagcctttgcgaggagcgttttaccgcaaccgggtggtccccagaggaggacgcccgtcggcgcggtgatgccgactttggcgtagatatcggggtttttgattggctcgacgatggcggtgacaagctcctcgcggatgccgccaagggcaccgatgtcggcccaggttgtatcggggattgtggcgaagccctcgcgcttagaggagggttggatcttggggagagctgtgaagaagtccgcgttggagacgaggacgacttctgtttcatcgccgatgggggtttctttagcgtggataataaggcggcgaagttcgcggactcgcgggctgatatcgtcttcgccttcgatttccatctccatttcttcgccgctgttcgacttgaggatctggagataccgcttgatggcagctgagccggcggtcgagacgagatcgttgagatcggcgcccacgaagccgggggtgcgtttagctagcgtcttgaggtcgatatcgtctgccaaacgcattttgcgggtgagtgcgcgtaggatctgttctctgactggctctgagggcacggtcatgttgatttccttgtcgaaacgaccaccacgacgcagagcggcgtcgaggctgtctgggcggttggttgccgcgagtacgataacgggttttccatctgtcttgtcgagggcaatatcgtccatgcaggtcagtagctgcgcgacgattcgcttttccatctccctctgagcgctctcgcgcttcggcgtaatcgcatcgatctcgtcgatgaaaatgagacaaggagcaagacgcttggcctcttcaaagtactcgcgcagggctttctcggactctcccgacattcctgatacaaccgaaggcgcagagattgagatgaagggcacacccagttccgctgcgaaagcgttcgcaatcaacgtcttaccgcaacctggcggaccatgtagcaatactccgcgcgggggctgcacgtttgatgatagatagacctgcggccgggtcatgggtagaataatcaagtccccaagttcctgaacaacatcatccaatccacccaaatcggcgagactgacatgtgttggtggcgaacgatctgcaggctcagctttgcgtcgcttggacacagattctccgccatgcgttcttctcttggaggagctgggtgccggggtgctagcggcttcggtctttttggccttcgttgttgcccacgagccgacgacgctttggttcattccattgggttcctgatatagcaattccaatcagattttccgtctgattcgagtaaaatatgcgcggtgcatcacttaccgtagcagcaggctcctcgagtccctcaaagtccccctccacggaatcctcatcatcttcacccatatcagctttgataacctccaagactcgctcaagactgtcctcaatgagtctcttcggtttgcgattcaagcttgagtttgatttcttaattgtgtcataaatcgctgggaccgatagtcggatgcgcccagtctcggactggtcgtcgataatcttgcgcacgatctggtagacctgtttttttttttgggtgagtcaaagccacaaagattcattgtatacacacctcacggtccaggccctgactgagggtcggcctgcctcccttcctagcagccatgattcgatatggttgttatgcaaaaaaaaaggccgcgggcccgaaatttcggagattggaattttgaaagatcggttgaaaattacacgtaattacgcgcccgttacataacgtcattcatgtctaggcccgcatctactccgtacatatgggggttctcccttctcttcatcaacatgggaaactcgagtagttcgcagaagatatctgcccaggatcggtgagtgcaacctgctttactttatacatacaatatcaacaacctattctcaatcccgcctcccagggcgttctattattgccctcacgagacccctcatccccacccagcatgcccattcagggaacgcaatagtatgattttagctaaccaaacactccgcggtaactgtagggcaattctcgacctcaagaatcaacgcgacagactgcaacaatatcagcgacgaataaccgtcctcacagaccgcgaaacggaaatcgccaaggaatgtctcgcgcgcaatgatcggcggcgagcactactcgcccttcgccgcaagaaataccaggagtcgctccttgcgaagacagatggtcaactcgcgcagctggagcagttaactgggcaggtggagtttgcgctagtacagaaggacgtgttgttcggattgcaacaggggacgaaggtgctgcagactatcaacaaggagatgggtggcattgaaggtgttgagagattgatgggggagactgaggaggcgagagcttatcaggaggtatgtgcctcgttgtctcttgttcttgttcggttttgctgacggttgtcataggaggtgagtcagatgctggccggtcatttgacgaatcaagatgaggatgaggtcgaggatgagctggaggctctgcagcgggaactttctggtcctgaaatcctgcctgatgatgtcgtactgccgagtccgcctactgctgatctgcccgttgaagagccagtgccagagtcgactcagagaagcaaggctaaggctgagactcggacagctttgcctgcttagtggggagatatgttggatactcgttgcacagcatcaagcattgcattaaattgatccatagcattttttttggcgtttcagcttctttgtttttgttgcctacattgctggtagagttcatgtgttctaaggcgttactggttggctttattgctcgttgtcatactcgtggtctatatattatgacaccatcagtccgaggtttacaaatgatactcaatatatgaacccaattcactggaatgagaatcacataacatcaatgaaatctatgtagaagtacatagtagtagaatggtattgtcgttaatcatgacggacccaagacacaccaggtcatacttccccctcgaacgaagcctatctattgcccaggcataatactgccaccgacaccactaacaccaggaatagagacatgatcctgggggttcgccgcagcctcataaaggaaattaatcggctcccgggttaacttcatgaactgccccttgaagcctacatacccaaccttagtcacatcctcctcgccatcactccaattatcctcaaagaagagcgtaacaaaggtagtcgcattccaatgagcgcggttcaagggtaattcaaagacatcggtgccgggtacaggctgcgggacctcaattgtttgagtcgggtgcaactccgatgcggttgagaaatccatatcgtcgcggttcttgaacagctttattgtctttggggcggagcttgtaggcgctgtgtacaaaaggagggagtggacgttgacctggccgttgaagctatgttatagaagctcggattagtttggggttggcgataacggtgaggggtcaaattagtgggggtgtgtttaggattttcgtgacgcgtcgcaaggggttgaacaaccactataaaatgtaggatagatgtgtgaaatgagcgagactcacgggatggtcatgagcagttgttcgtcggcatcactttcgagctcgggcttgtcgtttagtcgctcggcccaagttttctggacgatggctgtaccagagtttggggttgtctctgtcaagatttaaaaaatcgtcagcaatagttgcctggtgatcacaatggtcatgagtaccattcagggttgtgatcaggtcgaagttgatctgggagtaaaggagggattggatggctggagtgatatcgttggtatggtcgtgatcttcaccgtggcagtggccatcgtggtcatgatggtgccctgacattgcaagatattggtatagatttgatgttgtacaagatgtggataaggcaaagatggatttggatatttgaaggtgaaatgttttggaagctctccactcccgtgacgtcgttttatcccgagggatcacattgttcgaagtgaattgatatttctatgtattaatttacaatgaggtagtatatctgaatatctcactgtacagtacaatggcacaaattgcctctgtcgcttttactgccttggtttccgtcgatctataaaatgcaaccaacacactatatctcaattccacagccccctcaaacgcctgggtattattgtacatgtccctcctctctagctgaattcaaggtgctgttattgcctgactcggtaataatccggagcatactctagcaggtaactcttctcgatcttagtgacatcgcggatgtaagttttgtcacccgtttgcatgatttcgtggaatatgacccagtcggcttttcggttctatattcactttagtaaacccaacatgtactttcccacatgatctatgggtactcacaaacatcaacgaggtggggtgagcatgaagagtcagaccaccgctgacagtcttaaaggttccatctggttgcatcttcgccgcgtgagcaaagtagccagtcgtaagacaccgccgaatctgctccggctgcttgctcaaatcggctgtgccttgacgggatgaaagtgtctcatcgacttgaatgccaaagcgttctaggtaccgtttcaactggcctcggatgctcactgcgcgaagcagtgcccggtaattcaggaggttgtcgcgacaccattttgagtctttcttccctttggtgacaaaggcttggtacacgttgaggtacgtcaaatgatcgccctcttcaacggcgaactttcgccggtgactctcggcagatcttttgtctccagcatgttgaacccacacggtcccctgtaggttgaccatggccgcaattgtaaggatttcacttaaacaattgaaagatggtgcggtgagaagaactttggccatcataggatccagggcaatttctgccatccgtactccaagaggtttcgtgagtttggcatagtcgtcaatcgcaccgagagaggacaagagctcaagtgcacgaataataagttctgccggcggaggggtcaaaaagtcgaaccggacaatattgtcaatgcccagtgctttaagctgcataatgaccggtgcgagatttgatcgctgaatttcaggtacggttgcctccggcatctgctcaaacgcttgttgcgtgtacagacggaaacatttccctggtttcgttcttccagcgcggccagctcgttgggtggcggatgctttggatattggcactgcagtcagtgtatcaataccagtattggggttgtatgccctgagtttggcaaagccagaatcaatcacatatacaatcccatcgattgtgaccgaggcctcggcaatgttggtggagacaatgacttttcgggtgttttctggagtcggctcgaagacgtacatttgctgttccgttgtaagtccagcatagagtggcagtggaagcagagatggggccttaggatggagagtcgccgctctttcggatatcaactgaattgctgtgtcgatctcttcccggccagtcaaaaagagaagtacatcgccttctggttcttgggtatggatatcaaagacggtcttgactgctcgttctatgtaatcttctgccggagactcaaggaacagcatatcaactggatacattcgtccttccagactgatgatccgaccaatgcttccacccaaatccgccggttctgcctcgggccggtactcgtcgcccgcgaagaaacgaagaaagtcctctgcttggagggttgcactactaacaataatgcgaagttcagggcgcttcttgcggatcttcttcagagttccaagcagcacatcggtactgagagatctttcatgtgcctcatcaaccatgattactgaataccgcgaaagcaggggatcaaccagggcttctctgagaagcatcccatctgtcaagaatttgattcttgttgcaggagatgtcaaatcttcaaatcggatggagtagcccacctcttcgccgactttgcatcgcatctcttcggctacccgcgttgcaactgttgtagcagccacccgtcggggctagaacagagttagtcggtacttattccaaatatgatttgatcagtgctcacctgtgtaacagcaatgatcttcccatcctcacaccatcctgcttggtctaaatattgcggaagctgagttgttttcccactacctgtttggcccaccacaatagtgacggggtatttctcaaccaggtagagcaggttctttttgtgacgtgcgataggtaataaagcagccggtttatacagagctggaatgaaagaggtcgagagctcctgttctgaagccattttagaccgaattttagctgagaacgaactcttctggatttgagcccggttgttaaaagaaaccgaattgggactgggccattctgaggtgtcaagcgctttgcagattggcaacttggagatcgtcggagttctcgcagaaacatccagggcgatctgtataaagcagcccgctatcacgtgcgccccacgtcacttgaagcttccccgatatgttctgctctcagacattctcaggcaacacagtttttgtgaatttcccttcagtcactttcaatactctggcaggtcctgaatatacctcaagatgtcagaggaggaaaagatggtatgtttcaaccgggtatcatttcttatcgcatgaggctcacgttcatacccagaacacttccagcagaccctcagctgcccttggttcctctaacagcccccgagccgagtcaccgaccaccgcgcgcccgatggactttgacgacgagccccaggagaacgggattattacgtccgaccctatcgctactcagccagctgccgccgaggcagccccgccaaagccgccccggcccctgaacccgagagaacagtcggagaacacccttagggaggcatttccaagcatagagcctggcgtcattaaagcggtcctgaccgcaagcaattggaatgtcgagccggcgttcaatgccctcctgggttcgtggggaatctactaagaaatgagtatgagctgaccacgacctcggcttgcaggtatgaccgaccccaaggctcaagaagagatggcacccccgccaaagccgccgcgcccaagccaacagagcactgctgcacagcgacaactggaagccgatgagatgtatgcacgtcaactatctgagcattacaatgcggcaggacgtcgcgcaccacccccgggctgggagagtgatccccgataccagcgacctagaggaagcgaggagtcagaggagagagaatacagcttttttgatggtacgggctatagtggcttgccgaatgggctcgtgctaactggacgtttacagatgatctacctgtgattcgcgagaacctccgcaagggcttcctggagacgcagagtaaggttaactcgtgggtaacaaacctgaagaagcgtattgatggagaggacctggatgaggagcctagccataatcaaagagagactcctgttcatgcccggccccgacgtagtggtgatatgggccgtcgcagtggagatcgtgagcgttacgacgcggaccccaaggttctcggggatgatttctctgctcttgagttaagggatggagaaggtagataacgatctcaagtgtggcatcattgggtcttgctaactgtgcacagctcccccacctcgcccccctcgtccgggccgccccaactctaaaccatccgcatctccttctccagataggcgtaaggtgtctttccaggatggaccgcccgtcgagatcgacaacctttacgatgcttccacgccatccaagcgtctcagctcaacaggcaacaaggcgagcaaatggcagccactgtccaccgttgagccttctcccgtcgcggaaaatgacccattcagccttggcgacagcgatgacgagaaggaaactaagatcaaggagcataccacgggctcggagggcgatcagcccaagcacgtcactgtcgagtcagtctccgacgaagtgggttccacggaccaggagaccaagggcgcgagcaagcccgacgagtcaaaataatcgcgaatgtctggaatttgaatatccccactgttatctgcgcgaagcacttcttgcctttcctcccagcccgtgaccatatttatttcccctgtcgttttactctgccaacttgctctgctatgcgctacccacctccctgattttacgatacctagtagaggtagcccaagacgtttttcaaccttcgaatacctgcataaacccaagccaaattgaatctgtatttgtaccggaaagaaacaaaacaaaagggtatatctccgactggcccgtatagtagcctcaacgccaaaaccaaaacaaaccaacaggcctcgttcaattcactgataggcatcaggcaactcccgaggtctcttacacccacgccgactccccaaaactattactccatggcgggagcattacccacgcgctttgaacctgtctccttgcgcagatccttgatgacagtctgtaaagtagagtcagctgaaagatacctccaaaagccgagtaatgcgcgtagagtgctgttattggtctcgggggaaacgcgtaccgccaaagcatcggggttgaccccgttctcaatgagagacacacaaagtgacagctctgtccggtccaggttggtattctattcaaaatatcagttttatggttacagctttatcttctttttgtaaagaagagagaatgacgacatggattaggcagtcttgaattctgaatcctctctagtttagtccgggataagcacgcaccagcaagtcggagatctcctgaagaatatcgatgacttctctggcagcttggcgcttgtcatcagcctgatcttgagtttttggcggcatattttgttttgaaattgaaggtgggggttgttgaagtgtaaggcggttgaatctgtgtggttggagttgagttgattgtgtgggactctgctgcgggtcaaggcaaatcatcggcgcatacggagtatattgcatggagtactccatacattaacgtgatatttgatattttgataattatctgtattctctaggatacaacattttagttaatctcttaaaatctatgagatattgcgaacactaatattagtagggcattctctattcaattgtcaatagatggcaatctgtacactctcaatcctcgcgataaatgcattgtccatagatgggagaattggactatacgcggccaccttgataactaccactaagatctagtgatcttcccattcgcaccgaaccctaatcacaaccatccccgcccttcttactacccgtagacgttaggactcgggtgagacagaaacagatccaatagggagattgaagaaaatctgatattatggctatttatgtcaaacgaactgtgcaatagagtacctattaggctgatccggctaatcctagggccagtgaatacttttgttgtttttcggcatccggaagttaatgaatacctacatgtatgtaggtttacacccttgtaggggacttttgtttgctatgggttgtgtatagggtttaccatatgtaggtagtagacattctttcacatccttttcgtttccctgtttctctgtatgccttttacatacatttttcttatatttacataatttgagactactttgccttactgtgacagcctaactccatgcaatgggccattatgaagatatatttgatccctaaatagcgttaccctacagaaatgtcctggcatcgccaatatgcctctcgtgagcatgtagctaatgtaggtttgttttgggcatgtctctaggaagaggtgattggagatatcttgacaacattgagatcaacttttaaaactgtatcaaagtaatagattgaatggaggtcaggacggagagctgcatggtcgagaggttgaggtatacatgtgaagcgttacatcctaggacctaagctgagcacacggcaaaccccctagaaggtcatacttcgcctacagtagctgttctttcactagagagaggatttatataacaagcttggaacattctaagaactaggtcatgaaaaacgaggatagagcctcaggccctcgtactacatatgtactatgtagcttgtatgttgtaagcttcaagagaaagctgcatataaataaccattcaatagaagataagatgaaccaaaggtaaatacaaatatcatcaggtgattctatcttcggttttgtatctggagatagctgatatagaaacgtggaccgggaaaaaaaggaaatgcgacaacattggtacgaggcgaacggcgatgcgtactaaatggttaaggtaaatgcgttcagagaacgatgtaatcaaccaaattaaaagtcaagctgtacacaccgtacttcagctcttctcttactcacatttcccacgaacccatctgcagccagccctatcgggttgaggccaaacatcatgcctttcagcgtgactgcattcaatagggacacgggattcgtcatcgtaccatcgacagacccaacagcctggcaacaattccgacaccgaccctgtcttttcctcgcccgcaagctctctgcctggcgaccagccaaccgccccgacctgcctgaaaaacctatcactgtagtctgtattgcaaacgcccacagacagcgaccagtgataccgcatggtgacattctgatctatgctggtgggttggcagcagatggatcgctcaccgaactccaagccacgctggactggctacgatctcagcctcactacactaaaatcgttgtggcgggcagatctgaccggtatcttaacgtattcaagaaggggggtgaccgctggagatatggatatcacaatgcggcacaatggagcgacatcatctatctggaacacgagcatgtcacagtgactgctcagaatggacgccaactccagatttttggaagcccatactcaccaaagactgttccgttcccggccttccagtaccctgagactgataatatttgggaccaaatccctggcagcgtggacattctcatcactcacacaccaccatacacgcaccgcgactctctccaaggatgctggcatttgttggagcggctttggagggatcctccccgactgcatgtttttggctgttctcttgagaattatggctctgaacttttgcattatgatgctcttcaggaggccatggagcgcattgaggctgccggtgggggctttgtcaatcttctgaaggtgctcaaagcgcttgtacagtcctttttccgtcctagcatcaaagctaagactgcgctcgtgaacgcatgcattgaagggggattgtggcatcccggacgccaaccaatcacggttgttatttgacttgggctggaaattggttgcctatgcgcctaggcactttgcgaggatgaggtgactcgatgcgtgatttaccaatgaatgaaccacctgctttaactgtacatgcctagacgcgtagatgaaattgagatattgtcgactcgtagttgtttatagaccaaggggattctcattggtcgaaactcaccggtggggaccacgacacttttcactacactcgatgtttgaactaacttcctacttttacacggcataaactgtcacagttacagtgtcaaatatctggaacaggcgtgctaaaactagtcagccgtggtctggaatggcacctcgatccgaaacgggaggaatgtccggcctcaccatctcggacattcattccttaaagaggaacgaggcactggagattcttgcccaaatttcacgcgtcgagaaaaggaccttccccaccaatgaggcatttccattcggcgaggatttgtggagaaagaagcctaacacgcgagttctgtacgcgattcgagccaagggattgcaatctgatctaattgcctatgcggtctatgtccgacagaagggcgttgcgctcttgcacaaagtctgtgtgacagagcctaaccgccgtcaaggtgtcggccaggaggtgctgtcctacattcagcagcgcctgcgaaaggagggctgccagtatattcaactctgggtggaccaggccagggagcctgcacgcgccttgtatctccgaattggattcgaggagcgtgaggtcatccctgattactatgcccctggacgaacaggtatcaaaatggtcctggacttagaagcgtgatggttgagccactgccgtcaatgctgcactccacgggcctttttccccccactaaaaatgtgccttgccttatcggtccctttgtaatacatcctagggacaataagtcatggtggttggacgcgtctatgctccttggctgctgcaggagccacctatcgctaccccttgcatagacacgggcatcttcgaaacgtgagattatagcgatcgggcctgtgtccattctccgctatcattctgctacatacctccgtgatatctaacatatccaggtatggcttttttcaaagggcacgccttgaatgtctccctggtccctttggtgcgagagggaccgcgatccttttctggaagatcatgcgtgatactcattcatcttcgtcctgaatctctttctttcaatcttgactactttcactatctttcgccgtgagactgggagcatcattggtgattggcgagctagctgtgtactttccagctatatacagttccagtgtgctcgcgttctctcaatcgaccatggcgttctttctcaccatcgtgctggctttcctgtccgtcgccagtgcagcatcactgtctgccaattatcctatcaacgcgcaattgccacctgttgcccgagtttcacagcctttccgatttgaattcgcccaaagtactttctccaacagtgacgcggacactaaatactctctattaaacgcaccatcatggcttgaagtggacagcaccagtctcaccctatccggtacaccgcactcaggcgacagtggcgcgatcactttcaagcttgtggcatcgaatggatcggaaaaagacagcatggacgttactctaatcgtgacagcagaccagggaccgacggtgaacaaaccgcttgtacctcagctgcagaagttgggaccggtctcataccctgccacgctgttcattcaccccggtattccattctcgattgagttcgatccggataccttcaacaacacgcatccctccacgatctactacgggacatcgccaaacaacgccccgctaccttcctgggtcaactttgacccggcagccctgaaatttgttggaaatagccctgcttttccaggcgcggggcctcaaacgtttaccttccagctgatcgcatcagatgtaactggatacagtgcggccaagatgacttttgaactatcgatcggtccccatattctgacattcaacgagactgtccagacttttaaccttacgaggggagaggagttcaacagtcctaatttcactagtcttctctctatggatggttcgccaacttctatcaaaaagctggcaaaagtcgatgctgaactgccgaattggttgaaactggataaggacaatatatcgctgagcgggacgccaccgaataatgctgtgaaccagaatattactattgccgttacagactcttttcaggatcaagcgcagttgatggttcgcctagaattcctcaagctgttcctcgatactgtcgatggctgcgaggccgcgattggccaggagttcaagtttgtgttcaaccagtctattgtcactgatgactctgtacaattggaggtcgatttggacaacgatctcacatggcttacttacttctcggacaacaagactctttacggacacgttccggatgacatggatcctaagaagtataccatccctcttactgcatatcaaggatcgaccaaagacacaatggacttcattctcgatgtgctgagagcctcggacacacactcgaatcccacagatccgtttaccaattctaacagccccaaccacaagaaggctggcatcatagccatctcagttgtggttccattcgtggtgattctgagtctgctgattctcttctgctgctggcgtagtcgcaagagctcagccacggtcgaagaaggtccgtccgacagcaagattcctccgccacgacctgttaggccagatgttcctaattgtcagccatccatggcggaaagaccttctcgtgatgacaattccgaagattggatgagtcctatctccccatcgtcgattcccaagctcgaacttgggcccgcgtggaacgtgtcatcatttgataaacgggagcacccagttaactttactatccctgagcccgttgttccccctcgctctcctgctcgcaactctcccactcgcaactctcccattcgcgggggctttgtcccactacgagaccccatcacccaagaggacaacccagtccaaactgtctcaccttccaggaagcaaaacaatcgcctctcatacaccaacagccctgtgcgtcgtagaaccaccaaccggtcccgacgagagccattgaagccgatccaagcgcgagccgtgaagcgagaatctctccaatcatccaagtccaagagatactcaaagcgctcaagcggtatttcctccattgcctctggactacctgtacgattcagcggagccggccatggtgccggcggcttcggacctcctggacacggcgtggtgcacgcatcgtggcaaaacgcacgagcatcaatgctgagcgatgagactagcctaacaaatatggcgccgattttctcgcgtccgccagcagcaggacgcatgcgccacagcatggcatccagcctccacgacaactacaagcgtatgaccctacgcactgttgagcccgacgactccatcctttccgaagccgactccctcgaagcctttgtccacagccgagccaagcaccgcaactcctccaaccctctcttctccgcgcaaataagccggcgcacttcctcgggcatgcgcgcactcgaccgaaaccgcagcatgcggagtcgtgccgacaccgtctccgtgtcaaccttcagcgacgaattccgccaatccatccaagaacgtcccttatcgactgcgatgtccgcctctgactacggtgacgacagcaacaacaacagccgcttctctcaatatcagaactcccaatttcagaaccagcccggtctgtttccccttgctgagggaagcgtatatggccagagccagttgagtctcgcacaagactaccgcggtgctatctccccgctgccgcggttctggagcgagaatagtctgggcagtgctcggaaattggagggccagggcacctctcagcctcagaaagtgaatgatgaaaatgctatgccgcccagctcgtctatgatctcggatttggacgaacatctgtcccgcaaggtcagccctagcaaggaccctgatcatccgtggtggctgtcgtcgcctcttgagcccccgcggccgccgaagagtgctgataatcggggtcttcctgtagccagcagtggagagctggcatttgtttgatctctgacttcttcgcctatattttccttgtttgatgtctctctatctctctatttgtctttcttttctttctattatcgtttctggcgttatccggcattgcgagcatgatatccattggcttttctatggttgattcgttggtattttggtattttagtgaagtctctatgctagtaaatctagttctagagccaatagtaatatctctgcttcattgtttgatcgttatcgtagtgggccactggggcttttaggatacaccgcttggctttctaacatggaataatactgtgcgatgcgatacacaagtagtagcatgacttatgagcgggataagagcaccaaagaggaatattaatccctacatataagaactataagaatagtgtagattttgaaattttcgaatatggcgtgactgtacggtgactccatggcccctatttatcgtacatggagattctcttcaggctcaatgagatacagaatacaatatgttagatcctacgtagtcttatgtatgacttctttataacaaatatctctgaactcctaaacttcctccaacattcccaagagaacaggccagacaccacctcacgtgactctatagaggcacggcgtaacaaaagcggtaaacgcaataccaggaaatctctgcgagggtcttgtctggactcggacttctctctcctagcttccttgaaacttgtctttctaatcctcatctgcgaaaaatccctgttcttttccaaaaacatcccaaggcaagaaatcctatcgtcatccgtcgttccccacttatcgcgggacccagacgcgcgctgaaagccctgcgccctcatctgaccctttccctacagcacatctcctagcattttccacacttcgatccggaaacctcgaatcccccaccttccccgaattattcaatctttgccaatatgggtcaaaccctatcggagccggtggtcgaaaaggtgagtcgatatttcgcttttttgattcacaccccacactggcccattgtgaccctccaatgtcctttcttatggcgtcgaaacactcccctttcttggcttctgttatacctctgaaccagggggttatggaccgagtccctctcagttctttccgttgaacaaatagtccgtgctgtcgctcggaggaatcttcctcgggttgccatgcggggtcttgggtagttcagctgagtagtggggggtggttcgagcagcaacgaactggcatcgcaatcctaccaggcagccttgcatatgttgtggaaaagcatcgagtgtaactaacttgttatttttcgcttgttacagacctcgtccgaaggcggggatgactcctgtgtgtatggtgtgtcggccatgcagggctggcgaatcagcatggaggacgcccacgctacaattctcgacctccaggcaaagtataccggcaccaacgaaaaaccgaccgatccggaacaccgtctcgccttctttggtgtgtacgatggccacggtggagacaaggtcgcattattcaccggcgagaacctgcacaagatcgtctctcgacaggatgctttcgccaagggcgatattgagcaagccatgaaggatggtttccttgcgactgatagggctattttagaaggtttgtgcgatgttgtcgttgccgaggtacttcgtgctggatcgctgacttgaacccagacccccgttatgaggaggaagtgtctggctgcactgcttccacggccattatctcacagaagaagatctgggtggtatgttatgaccttgaaaaaaaagcccctatatccgattaaaggggtaaactgaccggtcaaaggccaacgctggtgattcacgatccgtcttgggtgtcaagggacgtgcaaagccactctcattcgaccacaagcctcagaacgagggtaagtgcatggaatcatacaagccgctacatgaaacattatgagggtctgacaaataattcaaacaggcgagaaggctcgtatcaccgctgctggcggcttcgtcgacttcggtcgtgtcaatggcaaccttgccctgtcccgtgctatcggtgactttgaattcaagaagagccctgagctctctcccgaacaacagattgtcactgcataccccgatgtgaccgttcatgagctgacgaatgatgatgagttcctggtgattgcctgtgatggtatgctttctattactccctctcgctattatcattgctaaacaatctacaggtatctgggactgccagtcttctcaggctgtggttgagtttgtccgcagaggcattgctgctaagcagccccttgcccatatctctgaaaacatgatggacaactgccttgcctccaacagtgagaccggtggtgttggctgcgacaacatgaccatgatcgtgatcggactcctacaaggaaagaccaaggaggagtggtataaccagattgcagagcgggttgcgaacggggatggtccttgtgctccgcccgagtacggcaagtctcccgaggaacccgaaagcatccccacttcttcgtgctgacgggcagttcgtgcagccgagttccgcggccccggaatccggaaccagtttgaggataacccggatgaatatgacctggagatggagcgttcgcgtggattaggtgtccgttcgggccgcatcatcctcttgggagatggcactgagctctcttcggaccagaacgatggcgaactttttgaccagaccgaggaagaccaggaccgtaccaaccaggtgcagcacgaatcaagcacccggaacgaccgccaggccactcctggtccccaggggaaacaggagaatgtcagcgggacctctgctcaaatatccgaatccccggcttccactgacgccgagaaagagaagtccgcatcgtaggctatgaacttatgaaccgtccatcgattggttctccctgttttggtttcaacctggttttattttccctgcccacagtcaacgacccttccccttgattccacgatctatgccttgttttcctccccttttctttgttttgcaattagttatcgtcgggctccagtcccgagcctgttacaccctttttttaactccttcgacttgaaatggataattgtcagagacgggacatgcggcaaagagacacagacggaattgaatgagatgaaagacaagagctttgaatttccatggaggtcgatgttgaaagagagagcccttcgccgggagctaaatgggcctcatgaatacgtttcttactttatgccatcaccacaacgagttaccgcagaaaatgcccgctattgacgagccatttacctacaattcctatccgctttttttccggggtatttttcttccccctcctaattcccggtctattccctacctacggtcattgatttacctatacgagaatgagtactaggggcgcaagctggtagagctgggtattgattgagattttgtcaggagcaatggacaatgacaacgatcatttacataccctttggcgtatatccgatgcattgcgcattttctttgtaccttggtagatgtttcattgttctattctggcaacggcgagtcaggtatattgacgtaggccaagccaggatgggaaactcctaccatcaagtcttaccaattgcgtatttgagtctggtagcaatgaagcacaacagtactccgtaaaaaagagtacattcaacggtaaggcgatgtatgacgtccacgatgtccacgataacccctgtaacccacacgtggtcggtgtaacccagtcctgccaagcctttatttgcaatctcccggccgtatttgcaattctcggtattgtaaaattcaaccccgtacactctacatcctgagaccgtggcttatgacagtggagttcggcccccactctttccccaaacagaaaattaccagtgtcccctaaaaccgggttgccgtcattcagggttctacatcaattctctccctaattctctcggttccccatcctttcattcatttccctcggaagacatctctcattcattcttcagggccaaatcatcatgtcgccttctacttctcccgccggcaagcgcaagcgcagcgcctcccaccttcccgcgcccgtttccaagaacgtcacagctgacctccagtcgtcgtcacgcgacgcgtctaacgaagaagggggcaaggactcaacagggcccgccaatgccaacccccacaacgccaatggtacccgccacccttctaagcgggcccgcaaggctgccgccgccggtgctgcaagccacaccgaggtgaacggggtcaagccggccgtcaacaaggaagaccccggcgagccatctgcgactaccgccagcaatgagaaggaagatgggcctcggtcgcgccccggtttacatatcgatttgcccgaagatgatgagcctgttacagaggagcagatggcgcccccggtctttggacgcctgcaggatcccgtgggttatcatactaacccaccaccaacgggtcgctcagtacgcgtttatgcggacggtgtcttcgatttgttccatcttgggtaagtgatcacacgagcggatcaggttttggtttcagcccccaatttcttcgggctgtgggcttgctcaattgggtaatagttgctgactatcactttacagccacatgagacaactcgagcaggctaagaaggctttccccgatacttatctgattgtcggtgtgactggcgatgaggagacgcacctgcgcaagggtctgacggtgctcagcggcgccgagcgcgcggagactatccgtcactgcaagtgggtcgacgaggtcatcccctgctgtccgtgggttgtgacgccggagttcctgtccgagcaccagatcgactacgttgcccatgacgacctgccctacgaggccgctgagggtgatgacatctacggtccgatcaaggaacagggcaagttcctggtgacccagcgtacagagggtgtcagtaccaccggtatcatcacacggtatgtttcacctcccacatcaaatccaacggactacagctgacattattacctacagggttgtccgcgactacgaccaatacatctcccgtcaattcaagcgtggcgcctctcgccaagaattgaacgtatcctggttgaagaagaacgagctcgagatcaagcgccatgtcgtcgagttgcgtgataacatccgcaacaactggaccatgactggccaggagctcggccgtgaattgcgccagatctggcagaacagccgtcctaacagccccgcgcccagcgcccgcaacagcatggactggggaatgcgtggacccctcaccagcccgacaggcggcagcaagtcgcacctgtcgcgtgtgggtgcggaacacaaccgcgcagatagccccatgggctcacgccgcaatgaggatttcgctaccgggtacagtctcggattgatcggaggcgtgcgtgcttgggtaggttacatcccacaatcgctggatatgcagctcagctttatctagtttaacttgtactaatgttcctcatacagatggcccgcagtcgtcaatctctccaggaaccccctagtgggatgcacagtcccactgacgaagaactcgagtccgagcataacaatggctatgacgaggaggtgcgtggccgtgccggtcacgtctctgctcagtagatgacttggctgggtgcctttgatgccgtatgtcccgagaagctacacattgggtggtaattatatacctgccattccagtccctatagccgcaattccccccttttccctgccccaccacactttcctcctactcttttgcatatgtatccatcttttcatcttgcattcggttcgtgtcctatacctttacaaattgtcccgtaactggcggtttctcctatgtcgggcgcttggtgtctttttttttcttcttcgtgaatagactgtatgccggccttggcttgttcaagttcgatgcagttcttttctgatttgttttcttacttgtcttgatttttgctttggttgtggttcggtggtttcaacgctcctccttccccttaatactctcccaatgaactttttcttgtttgatgtctttgtatatggccttgatttggtggtgatgattggtgactcctttcctctgatcatgctctgaccatgatctttgatgttggtatatccttcaaggccattccttatcacctgtttgttctagtttgtttataaaagctggaattgatggacagctgatcgggtatggtacatcacctcgccttgatcgtgtccggatatgaactgcacatagattgagatagctttgtttgatgtttcagtttccaattgcgtggccaattgaaactttgcaggttactagatctgatagatgttgtgtcagtatagaatgtatgtcctgtacgactatatccgtgagcctgctagccctgatctacgtatcgtctcttctggggcattgccacctataggtcggataagttatccgtttacctagaccctgcatatggattgccagacttgaaaagaaaaggaaacctgtcatccacctggtttgtttggtagatgtatagacgaagtacggattttgatatgttgcatgccatatgataaatgccctggatactatctcagagagcacgtacaaggaaatctcgacagttcctcgacacacctaaagcggctagtggatgcgtgccactagcgaaacatagcgtgtgggtactaggtagcccttttcaagacaaaaatgcggcagtaacaatggatcagaggggccatgctccaccttggagaagctctagagtattcggtccactcagactacttgttcttagactgccaagtcgtctatatgtactccgtagacttcgggaattctgcagatcccgaaattagtgttaaaatgccctgtcaattactgaggttcgatgacaccgagccgcgacagagtcagaaaatcactttgacattcataaacagagtgtccgggcgaaaactcgccaatcaagagcaatatctagagcggctccagtaggaattccctctggtgaacgtgcaatccattgattttgccgcaattccatacaaagatcaattaaagatcattcaagaatcagatatactggcaggtgtccatggagctggtctcacacatggcatcttcctgccttcaggatcggccatggttgaaatcctaccacctggcctaaatcacaagggctttcgcaatgttgcttccctacggggtcatgactatttcagcccacaagggcgactggcactctgaagatatttacctggatgttgagcgatttatgaatgcgatgaatgtagccattaaggcaatgtataacaagtgtttgcgaagttatgatgtttgaatagatcatttttgccacattaagtctttctgttttcaatccatcccaatcgaaatatcgccttgcctgggttcttttactagctatatctatatgttgaaaggtcacctgacatccattgtttgctcctgctatatagtcttccacaaacctgtagacagtttcttctttctccccacaaccgagaattttctagaatcacctatctccattaagaaactattagacagtcactcaccattattatactatatacatctttacaacgcatacaacgcttgatccgcctatatctaaaagcagtgatcgcatctcctacctcatcgcgatttgcatgattatcgaagctatgagtggctttgcaggagcttcagcaaaacatatgtcaagacgaagggacatcggagttgaaacatcgagcataatttgcagtcatctcttcacgcctcacaaattcctcttataccaacgctgagaactgtgtaatcacccagattaccggccgacactggtggcatagacgtgtccgctatcctcgaagagcgggacacctagacgaccatgatgactttgtttttcttctgtgtatgatcgttataggcatctacaacaccgagaaataaagcaatcacgagaaatttgacggtcaatgtccccacttatgtgacgaatcctccgatatgttgactactaccctactccccatggtcttatacgaggatcccttctgtgagtcctttccaccaggctgttttacggtcgtaccactaacatttcggtaggatgtggccacgaggtataaccagttcctggctatacgagtccactttctctactccacccttcctcaattactttgggcgcgttccttgcgggacaaagctcataggatcatgagtggaaggttcatatcctagcttggtgaggggcaccaatagagcagacagacaaagggttgttggctggaacccagatttacatctacttcgagtataacgacaacactgtacagaattcggggtgggtgtttgtgaagagtggaagaagatttgcgcaacatgtttgtattattgctacttgcccacagtctatggtttcggtttcttcatcacatttgtcacatatcatgtccatgaccagttccatgttccctgtagacattttaatatagaattgccattttatcgcaggtacgtctttatgagagaagctactgtgcagaataactagtatggaaattcgaattatactattgtgccattattactttaaagccacgctgctttactcgtataatatggacacatcaaagtctaacataattatagcaatttaatcaaacatcatctcgtatcaggcacgcttgcagcatagactcaggttataccaaagtcgtatagaaattatagtagtttgattcaaactctcattactaacggtggcatcttaggttccctagggttgtaggacaaaagatttcgtggaaatgagatgagacaattattagataatattaatgtactaccttgtcagaattgttctcttattctagcagtaagttgtcatatattgcacgagccgacctagccactatcgtcatgtacacagggggcatctctgttatcaaaaatgagcatgttttcattgtgtacaaggattatgtggttgagtttgggccctctgtgataaccctgcatgctcagctagtcagttttggttttaggtgcatatggccaagtgcagatctcattcattgggcgtgggtgaatggagctagtcagttttggggtttgttatttggtatctatttcgaagcagccgtactagccccaagtgttgataatgaattccgtcgctttggcgatatgaggtgaaatcagagggagccatggaggggaaggacgctgaataaacaccgaatccaagctgttgaaaagaacgtatactcctttttcctctctagatcccgacatcctccttctcggatattctttgtagttgagtaatatcccgaacaacatctctagcagactgatattgttgcttccagcatttttctgtgatataataacaaatatgctcttgctcatcagatggaaataccccttcctcatataaagactctatcttctcctcatcatcaaagctatctagctccggaaagggttcgtgtcctgtcatgatgaaataaattgcggagccaagtgcaaagagatcagtgtgcacatccgcatagtccccgtgaactcgcggtcgaaatgactttgtacactcacgagatagcccatctagtaatgtttcaccatcactcgacttgagcatgccttggaaatcagcaagtatgaggtccaagttctcatcaaggagcaaattccgaacatttagatcacaatggataacacgctttgaatggatataactcagtgcctcggcaggttgttggcaccagttaagccttctttcgagaggaataacgtgatccgaggtgatatagtccattaagttgccgtttggagcatatcccagaagaagaccatgctcggccagccccttggattggattattcgcggatgagttccaaggatgtcgagaagttgagcctctacttcaaggctttgccggtccccaggaacatgtgggtatttcaagacagtcgtgtcatcaacaaggccgatgtagcttccaccaccccaaccaatgatctctgaaacccccggaagatactgatggattatccgaatttcgatgtgggaggcgggggaatcggatatatcatttccagccggtgtcgtatcctcctatattaattagtaattatacacagtagactaaagatggccgagacttacaggctctggtttcaatgcagtgctcgctgatggaatccagccacacaaagccctgtagacggaaccgaatacaagattaagcggataacatatggttctgaatagagtcgagattactgaaaacattatggaagggttaattattccctcttcttcgtgtcttggcttttcgaatgtactgggacgtgagaagggggaatgggtagatgtatgcaaactatgcaaattttaaaatatgcaaacccctgtagctagccatggatgtatcggctaatccccctatttcggaaggagatcgggttgtttgcatgaaacggggttggaagatattcatgcgtttaaggactgaccgctacagtcattggcccagtacgtagcccagtcctgcggtaacatatttgaaggtagttgccctttgatctcaaatgagatatatatgatgattcttatattgtatgaggagaagaaacctcaagcagcagtaatagccaacctaatccccctcctcttcctttcttccatatccatcgcctccaacatcctcccaaacccgaccctctccctcggctcgcataatatctccctcaaaccctccctcaaaaggccgacgtccctaaccaactccccctcaacaacccccttagcaagaatatcgcatctagccgtaacagccaaatcaaacacatccaatcctctaaccccaagaatcggcttcacccactcctccccaatcccaaacggaatcctctgacccgacacaaccgcctccccagtactccccaagacactagtaaacctccccagatccaaactcaaccccaactcccgcaatccctccaacgaggcgacaacatcccaaaaccgcacccacaactcatcactatgcgtatgcgcatagatcgaccctttatgatccaaccccgccatcggcacccagatcggcatccactggaccgtcagtcttgaaatggcattccgggcaacaggcgacagcgacgctgcgaatgcaatgaaggtgtatagatcgtcgacgtcgaaatgcgaggctttatacaggattggctctgcttcgaaatagatggcccgacagacgcggagcagggcactgttgctattgcttagggttgaagggagaagggagtgagtgtgtgggtagaggagtctgtcgctgtggcctggcacgcggccgtcgtagatgcgccaccgggctggggttgtggggcagcagtggcggttttgggttagggaggggtttgacggaagttgggagttatggggcttttgatgagggctttgggctggggttggacagcgcacatggcggattttgccttttagttggactaagtggatggtttgaggggtttgggtgtttggagttggggagttggtgaggacataggaccatattatttggcggagttcaggtggaaggcagagaaggggagaatcttgaggttcgaattggaattggcttgatgctgattctggattccagtctataggtgggtggagattgctctctggagagcagattgcacgtgattggattaaatcgcggacggtgtcgcgccaccgatggccagttggataataatgccaaatagaatagggatcacgaaggacccaggcgtcgaagtggcgcattgggatgtatagaagtgaagagtaagaaatacggggaaattatggggcaagtgggcttttatggagaaatccacaattggtatagactaactagtactggactagacttatatattgaggtcttggttgtaacctaatgacgtcgagacagttggatttgggatttatcccgtggagagggcataacacagatataatgcaaaagtgcatattataaagtgctatatctattgaagattccaaggttcgtcattcttttcagtcatgtacgtgtagttagggatttgcatgatcacggcgaattaccaactgcggtctagcgtatcttttcgggtttagcgtgtttatatagagtccggccgcttcaactttctgctttccctgcttttggtgctgccaagtgtaaggggcctgaagtacgtcgtcattgttgtcgcccgtgcgcttggcactcctacaattctatctttctaaccatagagcacatatttccatctttcataggattgtacccttttcattcctagacttacatcgtagcatacagaagtatatagacaatgcaatggcagagggggctcctagccaatctaatttcagcaaaggatagaggtcaaagcgtctacaccctaaccctaaccccataacgatatatacaaaggcttaggatgcaagcgcaaaactcaattctcctgttctgacccctgcgctctctcctcatcatcggcgtccttgaaactctcatcctcagtggcatccttgtatccctccgcatcacgatactcctccactccactatcacttccgttttgggcaggactctcatgcgcaaacaccacataaatcgcacaagccaagataatcccagacccgatccaactaatgggagtgagcgtactcccccaaacaaccttatcatagaataccgcaaagaacatctgcatataaaccatcgacgtagcacgcgctccctgcgcgacaggcttcccatccgagaccgacgcaggcgggacgtacgacaaacccgccgtcaacaggaactgcaacaagaacccgcagataccgagcccggtcagcagtgtccattcaacggccgtaataggcactcggaacggcacagaaggcacgaccgccatcgcaatcaaagaaataatcgtcgtcacggacgagaagtacgtcacggacacgagggggtgcgcacgacggccgataatacggatagtactgtaagcacccgaagcgccgatcacgccgatcaaggcgacgattgtcgccaggatgtggtggtaggagtctgtttcggagggtggtttttcgactgccgaagtggacaggcctaatgcccatgcggcggctgcggttggggttgcaaatgagacgcttgggtcgtgcttgccgaaggggcgggcgatgagcacgacgccgccgagagagattaggccggcgcatagctgttttcgggaaaaggtctcgccgggaatgaggagcgagcaggcgtagcaggagatgattggtgagaggaaggttatcactgttgcttcggagagggggaggtattgcacggagtagtagagacagtaaacgccggtgaagccgaagagggcgcggaggaggaggagaccgcggacgggacgtgtgcctagtggggagggtgttgaggcgatgtacatgtataggtagcttgcaattgctgttatggacatgcgggcgaagaggatctgggggtgttagcttggtttgtaataatggaggtataggaatacggatatgtcgaaattatgtgatatcaaacatatcttccctttttctgtctcttacctggaaaggatgcatagagctatggatttccaagatctgcgtcatgacattcatagaggcagcgaaggcctgcgacagtaggacaagtcccatacccttattgcgtagccaccatactttccatgcacggcggggtcgcgcagctgcagcaatagcggcagcgtcgtcatattcatcgtcctcgataggacggggttctgattgagccagtgctggtcgggggtcggcttcgctaccactttcacagttgtagtcatgttcatcctcgccttgagtttgtgaagatgatctcttggatctcgggttcgatctcgactgctccacccggatcggcagcggtgcgtccggatgatcctcgtattggtcggcgcctgaggccgaatcacgttttgaagccatgctgggatgtgagatcttggcgtcgttattggagaggcgattggtgcggggattgtgggggatggagatggaggtatctaagatgacttttcctctctctgaaatcggatcggattattcttctatagagtctgagtgtacagtgttctcctcgagaagagatatgcagataaacaatatattcaggcgaaaggaaaggattcttatatctgcgctggactgccgatctggttaaaagagatttcagctcgaaatgcgcatgacggccgagtggagcccccgttgaccactgaccgcttctctttttactttcttcttgctttttctttcgacttttcgtgacttccatgatctttgaatcgacttgactcgaactggtttgcagatttagttgccttgtccctggttgtgtactaccatgtactccggactgtacaagaagcacaagcggcacacgacctacctcatgcacgatctactagctacatataaatatgcacctaacggatatttatccgctttcctttcctttctgtgtttcatttcatttcatttctcattcaagtttcgatttgcgtgatattgcttactaatcgccgcttcaagcttccaaggttccaaggttgggaatcgagctacccagagatgagctttgtatttaagggtttatgcgatcggcttaagtcgtagatctagcgagctagactatacaacatacatatccatgtcatagaaagccacagggcccatgatctctcagagttgaaatcacatggtctgtgcaatatatcctcttgcacttgagtggaacctcagggttggcttcatgatcgggaccacccggatacggttacatagtattctgcgagcagcctagggtagagatacaatctgagcttcgtagtacacattaatccctgattctaatatattattacagactcagacaaatttgcaccgaagatatgttatagtttctttttctttcgttgcgtggcaggccgaataaatcgaatggtacacgtatgtacagcgttgtattcgatatcacgtaggcttcatagtggagagcttcttcacggcactcagggtcgagccaatcatgagagaaaatgagagaaaatcgtgcaaagtcggtccgaacccgacccaccaatcccgaagcggaacatctaagacggtagatccaagtcctccatacagactgtcgaaggacagaaagtgtgcttctctttgagtaagatgcgtccttagtacagaggccgtacttgtatgtttccatctcactatatgtcccgaaggacaggatagttatcttgctccagcttatgtatggaggtggaagatactcgaccgtggttggtcgattattcaagatccgcttttcgcgcaatgtggggtttgaacacccgacatcactggctgttgtatcacgtgacttccaaatagcgtagggccagttatgctatgtatcaaaaagacccacacctgtataacctcaaaaaggacatgtaaaagaaaaaaaaaaataggtagcttctctttgattgagcgtgtcatccttagtgcaggggccatgctaatcttctctgtatattttcatttgaccatatgccccgaagggcgaaatgacatccttatagttcaatataacctcaattttcggcataattataccgcctatgtattactttgggcttaggcacgtgataccaggttacgtaatactttacagtccacagcagatttacagttctgttcaacctttatatcatgcattctctagatctggttatttcggttactgtatccacttgcctcaaacacctaccaaagaaatagtacatatggtcatgttcgttaagacaaatgatcagttgctgctcacagatcttcatcaagaatcagaaagagaacctgttataagtcattcttaattgtttagagtaatttacacacgctaacaagagttgcggtcagggtagttacagatttaacatacctaaaatagttagttaaagtatgccgtaagtaaaatgactataccgccagtattatgtccgacggcgaagtgtgaggcacctacggggtatgtatctagatgataaacaaagaacagtgcagatgaagtggtatgaaggcatagttcatacgatcacaataacatcgaccttgaaaagcatacacggctatatttatacaaaagtaaacgtatcaccccccttctcccgcaacatatttccagtcctcgaggtaccaacaacacgctccaacttcagcgcatcccacttcgagaacagcgcacgcacaccagcctcggcagcctcgatcaaagccgcaggatcaagacccaagaacccaacgatctcgccatagaacagcgcgttatctgggagcccgtacatgaccacacgcttaacaccgcggatctggtaacggcggaagtggtgcgcgcgctcggtatacagcagcacagagtggcggccggacacgaaatgactgcgggcacggttagcctcctttggctcagtgtattcggagatagcgccaaaggagacattggttgtttgcgtggaggtggcgaagtggttacgcacacggacgaagtcgaggtaggaggggatgaagatgagggtgccggcgccgcccttgccacggccgtgcgtgatgttcttcaccagagtggacagtatagttgttgtgaagtgcttaaagcgcgcgtcggggtctttaatgggcgacgtgctgtcgatgcgggtgaaggtttgcttgacggggactgcgagtgggagctcggttatggcaccggcatatatgggggttgctttgaggcgacccgagacgttttgcatatgggatgagaagagggcgttgatctcaggcgtgatgaaggatgagaccactacagtttgtcggacatagcgggcttggttgtccaagtaccaattacggacacggccaaagtcgcagccgtgcgcttgtttcggttgcaagttcaggtgctggaagatgtagtcgacgtggtcccagttctgcatgagcatggcatcagcgtggtcaaccactaccagctcaatcgaggagaggaaatcatgatcgcgcttcttgacgtcagactggtccatgatcgtacgcagacccagtggactggccagaatgatgtcggagctgtagaattgcgcgaaatatttgactgtcttgcgcgtgaacttgagacccagtcggaacatgtcgtcgtcattgccgccgaaaagttcccggaaatcctcggtcttatgctcccaggactcatcattcggcgccgagaacgagtcagtgaaacgttttttgttctcttgctgctcgggctgatagatccgagtgatcgcatcgagaaccttaacacatgcttgtcgagtaggcagaatgtaaagcaccttaggtctggtaaatccttggtcacggcactcgatatcggtgtccgggtccttggacaaacgggcgttgttttttaggacttggtctcgggtcttcagcaggtgattgacagtgtgcaaagcaataatctcgcgcatctcattcgcattagaagcagtacgggcaccgtagagaacgtcttggtagttaaacacatatggcgcgatgatctgggcttgaccggtgattttaggcaggagctcggccgcacgagccttcagtttttgtttaagctgcgcgattgcatgttagtatactcaaaatacaactcatgtttattccgcataccttgatgttggtcgtgctcttcattggcggaaggattgatggactgttttctcccgtttcgggaacagtatgtaccagtcgtagcccatccacctctttcttgacggatgcccatttgttcgattggataggctcaatctgcttgatcaaatctgcactctcgcggagatcgaagtgcttctcaaaagcagcagttgggtcctcgtcctcgtctacctcctcctcttcatcgtcggacggcgcttgggcttgcaaatcatcatcgccctgctctggttcctctggttcctctgcggtttctgctatttgaatctcagcatttgcgtttgcgtcggtggcaatcttgcgcttcttccgagctggtccgctggactcattgggttgaagtagctgaaggagttcattgtatgggcgttcagtattctcgtcttcttcgtcgctgctggaaccctcgtccataacggtctcatcaaccaattcctcttgggattgctcgctagcatcatcttctccgccagaagaatcgtccgatctagtgataattagacacagtcattagactccagactgtgagaacttactcagactcgttcaatcgcgaagtcgcaaaggaattgcgaccaccacgaccaccgcgaccgccgcgaccacgacctcggccgcggccaccacggccaccacggcctcgagctcctctaaaagaaccaccacgaggagcaggcatgttgcgaataactggaaaagagtgggcaattccaagctgttctggccgaaatgagaattttgggggcttatcttatcttagcgcgaaatttcccacacacaacagaatcggaacaatcagagcggctcactccaccaaggaaaaattgaacctccgagaaacgaaggaagtttggatcttgaaacttgcaagatattccatccccccaaaatcaatcatggccgaagattctttccttcatctcgctcgccccctcggccccgttagtgtggggaccgctcctaccactgcccctctgaacgtggtcatccaaccccaggtatgttgcgatatgtgtgtgctatatgatctgaggggtaaagctcattcctcccaaggcaatcttttcagttctcgaccactctcttcgccgcaatgccgaccaggagcgagttatcggtacactgctcggaacacgatctgaggatggaagtgaggtcgaggtccgatccgccttcgctgtcggccactccgaggctgaggaccaagtcgaagtcgatatggaataccacaagcagatgctggctttgcacctgaaggccaacccacgcgaagtcttggttggctggtacgccactgcttccgagctcaacactttctccgctttgatccagaacttctacagcggccagggtgatggtacctggcctcaccccgccgtccacctgactgtctccactgaggctggaaaggatctcgagactcgcgcctacatttccgcccccgttggtgtcaccgctgagcgtgctgccgacagcgctgctttcatcccagttccctacgagctccgatacggcgacgccgacaagagcggtcttgagtctatcgccaacgctaaggatgccgaggaccgttccacttccgtcacttccgacattgaatctctggagcgcgccattgaggaggtcctgtctatggttgaccgcgtctcgcgctacgttgagtccgtgatagacgaggagacccccgcttccactgccatgggccagttcctgcttaacgctctcgctctcgctcccaaggtcgagcctgccgacattgagcgtgacttgtatgttaaatctacattatattccctggtgtttcttgccactaactttccacagcaacaaccacatccaggacgtcctggtcgtttcttacctcgccaacaccgtgcgcacacagatggagctttccactcggctagcgaccgcccagcttactctcggcggcggcggcgagggccccgctaccggcgaccagcgcaatcagcgtggcggcaagggcaacaaccaaggcggccgcccccgccaggaccgcaccgaggagacccgcgcatgagatgtttcccacagcaaaaaacgctgatgcataatgtgaccaattgcgagaggaacactcctctccaagtgaacgtggatgtctcgtctcacgttcccttccctttctatctcacccttccctgacattattacttttgggtctttcgcttcttgttcaccaaccctctaccgccttcgtccctttttttcctttttccggcttcctcttttttttttactcgcgaggcttacatgttctctccggagctcacggactgtggcctggtcccatcaacggcttccggactcgctctgttttgacgttcaaacacggtcttcaacacctggtgctgtggtattgagaccgatttactatcaatatgattggtataacatgtggtgatggttgatgaggtgacgatgtcattaccgttcgacgatagagaatattcgggggtgatgagtctagactgttgaagatgagagatgggtctgcgagacccgatctctccggttacgaagtcgcatctttctaggcgcggcgttttcagttatgatgaaatggacataaaagttctagagcttcttcgtattgtatatttcccaccatttactattccggctatagccataagaggctcacgttatagtcctccttggtcactgaggtttcgtatggttccaattctatctagatatcaagcatttcttgtcggctaacgtccaacatatcagtatgtcacttaaatgcgacagcttcaggcttgttgctatactcttcatcgtcctcttcatgccggaccacccacctgttccggctgaactcatctacctgtgctactcaagcagcagtaattgataagcaagctggatggaagacacgcttaggcttcagtattgagatgttcaacctctatgtttttgttgcctcgctcgcaccgaagagtctctctttttgtcttcctgaaagctcagatggtggactggcgtgagtgttgacaagatggcatcggacgggcaatcatcatcataatctaagagaaagtagagattccgaagatatattcattgactagttgtatacttgtcgggggtccgaatcgaatgtttctgaggacgcggaatgcacggctatgagttctatttggcgcaccataacacggcctttgctcctgcgtgcgacatctgattttctaggggacaatgtcgccaataaggtagattcgaaggaatatttcctggtacagtccgtctggggcatcatgggggaggagccttgtcgtggatctggtatttccggtattgttccgcggttagcatagtcaaaaggtactttcttgtcttttttttttacgactagaagcctcacattcaatcagataccgtaggtctattgagagagatacccatccaaagttggagatgtcgttaagctgggaggggcacggatttgacgagattgttgtcagtctaggactgcagctagaaggcttatatttgttgaattttatggaaggcacaaatggtgtattagtttacaagttagcctcaatgtaggtatgtgcatgtagatacagccctagacctcatgtttcaaagtggggaaggaggctggcggatctgaaccttaatactttaatttgactatggacgggaacaatgtagagacgactcaggctcttggcatggttctactactgataaactacagtatataacgaacgtggttctagcctagtttgctcctatcaccgtggtcaaagcgttgtgatgtcccagtgattgcatcgggcgagtgggagggcgcaaatgcgagtcccgatgtctgtcttacctttgatataaataaagtgagcattgggatttgataaatttccattgtatttctctagttatttcttggtattggaaaaactagctgtaaatatattggcgaaaagaaacacacgttgggcattaagtcatgttcgtcgtgacccacagcaactgggcaggaattggtggagttattgagggtatatgttcagccaatcgtcttacgcttcttcgaaactgactcctcggtagcatcagatccacggcgggttgcagcacctcttttccccttgcccttactcttcttggtaacagtagcagcggcagcggcttcggcagccacaggatcctcgccagcagcagcagcagcggccgcagcggcagcacctttctttccagcttccttagcaacctgatcatcattctggtcaaatgctttgcgagcttctttcaattcacgttccatgcgcaacagctcctgtacacggccgagcttgttctggtcgcgacgcagtgcgaagcggaagtcctcaactttgatcttctgacggcgggcgtggtgtgcgacttgcgcggcgccgtggcagagttccaacacgaagtcggtgacaatttcgtccagcacgcggactgtctcgggaagtggttcgttcgggaagctcgggtgtgggctggggtcgccgtaggcgagaaggagcaggcgaactgttggatatagttagtattgaatttggctttgtaacttctattaatgaatttgcatgggctgccggaacttacgttcattctgaaagttcatttgacccttgtgccgggccgtacgcgcacgtggttcggccatggtgggcttggttgtagactcttttttgtcctttctagtcgatgtagatgccgtgtcgggtgaactaagagtccacttaggtccgtatccggcacaatttagcactgtatcttgctcatcgaagccccaattaggcgagagttcagagacaagagtcttcgagctaggctgacgtgatggattgcgagtcggattggacgagtcagtcttcgaggttgatgagaaggtgcttggagcttggaggtgagcgtttggaggtgctgagattgtagtctcaaagggacagattggagtccgagtccaggtgttcagagtacccaatccagtgtgtgatggcttaagaggtagcggagatgcgtatggcggcaaggagaatgatacccgcttggccgcttggcccgtgcgcttggcggacataccaggcagaatatgctagactgggggttagttagcaaccttagcacatgcaggtacctggcaagttacggtcgcaattctctttctttgcccaagtgacgggtgaagggtttacagttgcaacaaatggtgagtttatgtaaatggcagaatttacgagagcaacttttctgtgagaagtatatgtggcttggctttcgcgtggcgttcatgttggaaccacaatgatagtatgattactgtgctaactatcacactcacctagtctgctcttttcaactttcaatcgttgcttctcgtgattctcctgataatctgcacgagcagctatgcgcactcgataatgccggggatcatggaccggaaccagaatgggtaggcgaccacctgaggatgcgcatccgggatgcaggaagatgacggggagactgatagttctttgatgtaggatctttgggatattctggaagtctgctcgggtcggagagcgactcagcccatacgtcagcatatgctgtgtcgtgatggcagtaagttctctccacgagtcccgatgtatgaagaaatatacatactgatgttgcatgcaggtgtcgatcttcttcggtgattaacattgcttaagtctcaatgggtgtttggaggggaattcctacgtgataatcaatgcttgtggtagtccccaacttcgatcggacctcaagtaaccttagtcgggggttataagagattactattactatttgcccttcacgtgatggtatccagatgcaatgagatattcagacgaacaagaggttcatgatgcggtagtatatagtacataatattaaaatctacaaaaaaaagttccaaggcacttcttcaggaccaatgcgtccaaaatacttgaccctccaaaggcggcagtaaaagacaaaagggtattcctattttacatcttaggcttcaactttgactccaacttctctaacccattgtcaatgagctcgtcgtgcaccttctgatcactgtgaacattggatgcgggctcgagggtgagaagcttattagttccatccgaattaaggccctcatccatctcctcgatcgccacccagaggcgttcggggtcgcggagataacgcaaactcttcatcgtgtaatggtcgatggcaaagccttccctttccatcttcgtgattgcactagcagtttcagggatggcctgcgcattggcgaatccattgatgatggtgttccaagtcacctggttgtactccacattgtgcttggccatcatctccttgactttctcggcggcatcgggctggcgactgtaattgaaggcactgaggaggatggtccaagtacgatgcgtgggtgcgatgtgcttgagaggtttgccagtgatagtttcttttggtatggcagaggtgtcaagcatgtcttcgacgagacgtatgcttgaccttagtccacggctgcttttgcggaaggcgatgaggaattcattatagacgtggtcggtctcgaccagaggagcgatggatggatggccctgctgcacgagctcgcggaatctgtcatacatgtgatgcacttgtgatatccgattccgacaacggaagaatgtcgcgatcatgaggaacaaagatactggagatggtggggttttcaattcaagtccttgacttggcggcggtgagtatgagggagggagtagaaggagttctttgagcggtgtgatgtcgtggattttgttgtacatgtcgagcatagagtagaaaactcccgagggatcgctctcgggatcaatatgcttggcggtaaaagtgaaatgagcgtggaagattttgctgaaaatgtatgggttgtttcgtaattcctcttgcatctcgacttcccgcaccagctcgtccacacgaccccggtcgcctcgagacaccgcatcagtgaggagagtcagatatgtataagaatcgaattcgtggtggtgattcttcatgaactgaagcatgtccgaccccaattgaggatcaccggttttgtaagcattggcgagcacgagattcatcatgtcccggtctggctgaacacccattttgagaagccgtgggaggatccggaaatttcgtccgctggcgttatcctcaacggtgtccagggtcaggagcttgcaacagtgccgtaagactccttcagagtccatggaaaattcagggtcattgattttgggaatgaattcgagagccctaagggcatattccacgtcgttcaactgtgtgaatcggtacatgtagcaaagtgctgtttgcgcttccatcgtgatgcctcgctcgttcattaaacggaaactctcgtagacacctaagaagcccgctcggcgaatatagaatcgtatacccctttgtggcggggagataattggccagtcctttggatccagggaagttgcaacaaccgattcgaatgtgtgggcaccctttgtccaatcccggagctcttcataatgaaatctttccaagtaagtcaagcaatcaacaaccatagttaaatctggcttatctcgtggctcagttgtgacgagtaaaaactctaaggccattgccgggttattttgcagaagccaaatggccaggcgttgccaggcccaagccctgttagggcgggtcattgccagccatgcctctcgaaacttgccttgacagtcttcgagaagcaaggctagcagttgctcgccatcttctctcagctttggcaatgcagaattgtgcaagacctcacggccatgtgtcttagccttgtgaattgctccatatgcctctttccattgacggagacctagctcacgcatgtaaagtgaattcattcgcattgaaagcgccaggtataacccgcgatcggtcaaatgtcttcccttgtttaagatttctcggttgactctctcagccgccatggcgacaagcttgggatcagcttttcgcacataagcgaccttcttcattttatcattcgttataatcggtgtctgtgatgaacttcgtggttgggttgaaggttttgattgtccatggcctatgccatactgatttgtcgcgacctgatctgattgttcacttgtcggcgaatgtgaactgtcggttgaaccgcggttgtgttgatatgatatggggtcaggagcatcatgtgtcacaccaggttcgaagattgcaggagcattgtatgtggagaggcgcactctatgaccaacattcgtccctgactcccgataccatcggcctagagtccgacattgtggtgacagcaacccgttgagacgggaccgaacgagttggtgcggacacgatgacattcaggagcttgtacccgcagacatttgggggaaagaccaagacgaagaaaataagtcaagtacagagtatggcgaggagtcaaagtccaatgccggacagaaagttgaattccgccattccgcccgattttgccgtggctagtgtgtggcgcaccacatctacttttatcgcttcatcatcttcaactttgaagcagcggaggagcttgcgaatttcttccggtcatacaatcactctgctttccagtccccaaatcccagatattccattcaccctcagtttaaccatcgctcgaaaacatgtcatcaaaccatgccagtcttgatgcggcatccaccgaccgcaaagcccgcctcgccaagctcgcagctctgaagcgcaagcaacctgaagaagacacaaatgaggccagtgcggaagaccaggagctgcctgacgccgattctacgccagatgtgagcacaaaatatctatccggccgcaactacgaccccgagactcgcgggcccaaactgggcttcgagcatggcccgcaagagggccaggtgacgctggaagcacaggcggctaaaattgcaagagccacagcggaacaagccaagaaggatgcggatgccgacgaacccattgatctgttcaaactacaacctaagaaacctaactgggacttgaagcgcgatctaaacgaaaagctcaagattcttgatgtacggatggaaaattcaattgcacggatgttgcgacagcggttagaggacgcgcagcgtgatgcgaaggcgcgtgggcctaagtctaacggagacgagcagggggaggaagtgggcatggagggtgaagcgctcgttgagggcatccatatgcgcgaacgagaggaagcaaagagcgacgaagaaacgatttgaacttgataccctttgtgttgcaggaatgcgagcgttgtctaggtcttctgcctccacctgtaattgtctatattctgtccatttaacttattccttttttttgttgtctcggttgaggcgtccaattgatgccatgggcatattgcgcacaaaaatgaggcgttaggaggtttacaaatcaagatcctcaatgagcatatctatcttagtgtcgttcagaaatcattattggattttttttagttccgctgtccagtgacagatactttcaaactccgcaatggagatgctaatgatacacttagtcaaatactgatggaacacgaattggcgccgtgttccccctccatcaagattttgcgccgtatgaagccctaatattgcagagcaggttttcaattcactttaccgtccgttattcatggcttgagtcaaagcaaggcgcttactgaaaggactcaagcttcgttcccgaggaagctggttcttctccattatgggatcaggcttagagcgtccagattgagactgacgtgatgggattgcttgatcacggtgtgaacggtcccggggaacgtcctgagtcgtagcacgtgattctttcactcgatccttatccacactcttgcttcggcggtcccttcgctcgctatgtcttcctgctccacggtgacgacctcgttcttcggggctagattctcgtctccgtcgccgggtgtttcgatcgtcggttcgctcttgggagggtgagcggtcccttggtcccgagtagaatgaccctgaagaaccctctgttgaatcactgaagcgtctctttcgggactttgcaggtggtgctgatgaatcatttcggcgacctctgtcagatgcgccgtatttgttacggcggggagatgaggaatcggatcgattcgtagatatcgtttccactgagagggacctagcccgcttcggagactgaacgccgcgatctgtcatatcctcaaggtctctcttccggccacgctcttcctcccgagtagcaaggagttcgtctgccacaccctctcttcatacaagttagcgaggactccaatgcaggaaaatgcagaaatgacaattattcacgtgaacttactttcgcaaaaactcatttggattctcacttgaaagcttgggcatcaattctggattcagtagctgctgagtccttgaaggtcgcgggacatatgggcgctcttgcgcggatgccttgcaatcaaagctatagtgtcgtggatcggagttagtcaaacgtccaaagagcaaatgaaatagggtacatatctcgtccaaggcatttttggcacagtgtggtcgcggtggccctgttggagttggagcctccaagcttcggggcgtttcgatatcggttcattgggactcgtgatgttgtagtttcgtttagaatcctagattggcaggtactttaggtctgaaataaggctattgacgcgcccacgataagaaacacaggcaacatccgacgtaaagctgatcggcgcaaattagcgtctgttaccctttgaagcctaagggaaattgtaggcgcgcgccaagggcggtcgggcgcggcataatgcccacgaatcttcaggtaatcaagaattcagaattcagatccccaacgctccttctcgatctcggagttcattgtcaacattcacgtcatccatctcggacggacgatctagagttgatcggctcttcaaatacccgtcggatctggaatcccctcaaaactcggtacgagatctccctgactatgagccagctttgatatcatgtaaggccccgttgcctgatccgcctagacttctcgctctattgaagtggatatttctcctcattgatcctatggatccctttactttcatgcatggtgctaatgcgcattctccacagctttctccatggcgattgccctaccccagagatatgtctttcgttttgggcttgtgtgaaacgaaattacgcagcgacattactttcaaccaaacaagcttccaccttcttcacatttgcaaatccgaagcctgctgagtgcagctgctgcttgaccttgatctcggattttctttttttttttttgtgaaatttaaccagtctcagcgaccatcctgcagagtgttgtcatggcgtcaaaaagtcccccaggtggagacggccctctctcctttgcaaaggtaagctaagagtttgctccactacctcatggctcatcgctaattccgtgacaagatcgccgctatgcccgcccccctcagcccacattcttcctcggtatctgatgaaaacgaaatatgcgagccagcagaccaatcactttactcaaaagcaaatggctccggtgcatctttgcccagccagcataatgtcgataaaacgccagaggctagttccatagaactagctgttgatgatctagggagaggtgtgcaagacattagcatcacctcggaaaatcacagtgatggaccaagctcgtttgttagcggccaagatgatggcttgctcaagcgggaaaactcttttgaagatgatcgcactcacctttctacctcatccacaaaaatgaccaactttgattccaagagtcttgcctcggtgacgacctttgcaatggatgaaaaggactctgtacgtcccgatgatagtgctagtgtgcaagcgattgatgaagaggagtcgctttccggacttgcttctggggctccaaactcagtggcaggctctgaagctggcagtcgtgcgtttcgggatcattaccgagatggcattcctacacgcccacgcggaattttgcccgtgcctcctctctttggcggtccccagccggtgaatggtgcaattcctccagattcaatcgcgaataatttcgtgattccagccaactccgatggcattgaagatggtcagatattacatgggtttcccttggagccggatgaaaaactcctagaggcaatgaaatcaccgaaagatcggctgctgatcctgcaattggaggaaaaaattcgacactttatcaaggactgcaatgagcagtctctagagttgcccccctcgaacgcgtttgggcgacttcttgcacacaagctaggagattactatcacttaacacattttgtcgataacaatgtgacatcggtcaggcttcatcgcacgccattctgccggctacccactcctttgtccgctgtgcatgctgcttccaatagcactccacctccagctgtcccggcaatgaaaatcatgcgccgaaacgatggagggcaattcgaaggaagtattggaggttcttcaaacccttccaagaccaactcggaagatggcgatagcggaccagatggagaacgtcactggtcttcttctggtgctacacacgctaaagatcgtatggctttgacgagggaggaacgggaggcaaaataccatgaagtacgtgaacgaatctttcgtgattttcccgacagtgccaaatcagatccggccagcggtgactcgaatcccaacatgtcacgctccagctcggcgaatgggcgcaaaaaaaaccagaggcagcgaactcctcatgatgacagctttgaggttcgctcgcagttcaatgcctactacccaggtatgcaatatggaaatggtgctgctcagtacaatgctcctgtaaatgacagctcatatccaaaccaagtaccttacttggtgggacctggcgtgccgccaccctctggtggatacatgccatctagtcggaatggtgccatttaccctgggcaactgaacatgaatgtgaatgtgaatggctcccagtttccagtggcaatgtcgcctcagatggcctccaatagctcgtggcaaggaggaaacatgccgcaacaatctccatattccgggtatgctacgatgaaccagcaggggatgatgaaccagccgtcctcaaacgcttcctcgccggcaatgaacaactatgccgtgcccaatgtgaccccgtatcaacaaaaccccaattggaactcgcctcctttccccacaaatttccagcagtcccagcacccacgaaatggaccgcctgttcactggcccaactatcctcatcagccaatggcttctaacatgccactcaacatgccgcttaacatgaactcaaacatgggctccaacatgggtcttaatatgagctccaatatgccgtccaatatgggcgcatatccttacgctcaataccccgggcagcatatgaatcctgctctccaaaattctgccggatcccacgcagcaatgcaagcaggatatgccaggtcacacttcaaccctcagacacgctcattcatccccggcggtgctcctctcgggcgtcacccgaacaaaagccaacacccaatgcagccgtatggtaccatgcaacctggcgcccaacagcaatggcatgggtatccggaaccaagttccaaccggactatggactcaaccccggctatgaattccaaccgagtgcccaccggtcctcgagactcgatcgcgaaatggggcacaccatctcatcttccccccaaacccccgccttccgaagtcccttccgactttgatctaaaaagccgaaccgtcccggcctcggtcccagcaccaacatacagcaacaatggaatttccgccgtcagcaatggaccacttgtggtctctgggggcacaactgtctccaagccgaactaaagcttcacggttttggtcacctttctactaccatatgtgttgtatctgtgatccttgtgtctttggaagttgtggagatatgaacctttgtcccgtagtctataggctagattcatatgtccacatgcggcaactatcttccaaggcttgcatctgcaacagtacaatgcttggcgatccgggttcttgtgcatgtacctagtcgctcttagctagtcatgaacctgttcaacttatgtttcttctttctcgcctatttggaggacatagaattcgaaatggataccttccaaaacagtataagaatcacgactaggatgtcctatatgtaatgtagccaaatgattaaaaggagaatcgacttatgcgatgaacaaagtacagctcaaaacaagatggactccagtaattaagaaggtcttaagaggtaggggaggagaggagaggagagaggaagagatttctagagcaagcatgtactactacatacaagtggctcctataacacgtatacatgcctgaggccatctgataatctgtaaaataaagcaatattcaccacaatatacaaattaccaacgataagaggacgatggctcccaatgtcaagcactagtatatctagttaccttgcagggcctttgttccaatactattacatcggccataaacccttggaaattttttggaagcacagaagtctccttctctgatatactgcgtctcgaatcagcagcgcatgttaagccaatctcagacgaaatgccaaatagtagtagggtttattatgattatgtgatttacagaatagtatagtttcaattggttgaaagtgatatcacgtgtttctcttcctattttgtcgagttggttgaagagaagagattcaatcagtatgaaagctactagttcagagtacgaatagctattaccgaatatggtgcttacttctcgagttgcatatatgcctaatcaaactataaactatcagacaaagaaacagcacttgaacccccagcttttcacatccaagtctttagccctcaatatatacgttcaagttccctcaaatatgaaacccccatcagctcatggaatatattgattcgtaggcggcttatactgtggcctagactgacgggttccaaagatcgcagaaggaacaataataacaaccataagaacaacagccccaagagccgaaccaaatataatccactcacgtcgacgaggcctatgacgcctaaccgtccctatcacagactgtgactccggatcttgtttcccgtctgctgcagactgtcgcccactttcatctccctggcctctgtctgcggctccaactgcggcctcgacctgcttgtctgtgtgtttgtcgtcgacgtattgattgagttccaggttgtagtcccggtcgctgaactctagcgtgcagtcccgatcattgacttgcaaggtgcagttctcgttcatgctgtgttcgatggttggtcggggtgggtatggcactgcgacttctttgtctgtgtcgggatatggggggcttggagcattttgccggagcgggttgtgtgtttcgagtgacggtttttccatttcgagtattttctttggctatacttcttctgacctggtaggagatcagcaaatgatgaattctggaaagtacagttggggatatcggggtattacatacttcacacaagaaggttgcggtgtagtaaagatgggtatcgaattctggacaacagaattaagcactctatattatttggccggatcacaggtctcgctgggcatggaatattgtagaagagaattcgagactttgattatatcccaagactataagccagatgaataaatggccccttgggcaggtcggcttggcttgtaacagcattcgcttagatcatatgctagcgagcccaactattgataactttgcattgaattttattgtcccttgattgtaatttctgtgtgcaggctgcactagtctgttacgccgagctgcagctgatatatcagatctggtcaaccgccccaggaaatgagcgttgggagtctgcacggaattttggacattttccagaagtatttggtcattggtgactcaataaaacctcaatcggaagtctgattgccagaagcaagttttattttggttgaggatgctatggattctcaaatatatagttcttcaatttcctactagcattgttgacataactaccaaaccacccagaaactacttagtatcaatagcgatgcaataaaggcagttattatttgcggtgagccctctatttgatcgacattgcaggagatggcgttggtaaggctgttgacatcggtatgatttgaaatctgatcgccaggcagcacaatcggcaaaatgcctagttctgaacgtggatcatattgactggcggggccttcaatcgtaacatattgtccagcagttgatgattgatcttcagatctatataaaggcccgggataaaaatgtggcgacgtccctcccgcagcatgactcgatatctgcctttaccggaacccaataaaccaaagaagaagtgcgaataaagaggtatcaaaatcttttatacagaggctatgtcacatgcgcgagtgcaaacggagacgaaaatgccataatcaacaggaagaagacagaactcctggtaagaaaaacaagtaaagaacatagtcaacagcaacggagtcagcctcgaagacaagaggatgatgcatcgagaacgccgatcaaagcccagaagagaacatctcccaaacagatatcagagatcaatcacccccggccgaggattccgaaatagaacccccacaaaggagagcactccccacatctaatccctcgactcaacctccgcttcctgcttagcgagcttatcattctgcttcttggcaagactgagctgggaaatcgcccgctccaaaacgtcaacaccgtccttccggaactgcgtaaccttcttcacgttcaaccttgtgagagcgtgcacaagatcccggccctgctcgcgctcgcgagccacagtgcgcgccgtcatggcgaagcgcatgtccttcggcccatcgaccagctcgaggatagcggtgggagccttgacctggggcttaggctctcggacggcgtttttagtacccttcttgggggagaaatactcgttcttttcgcgaggttctatgcgtagcactcgtgtgtatccacctggacggtctgcgtagcgctcgcggaggggaccgaagagtttggggagcatttcatgtggtgtctagggaatgttagtgttgtcattgggttgcgggttcttttttttcctccaaaggatgatggatcggtaattgcagcaattcatcacaaattcagtaaatccatgaattctcgtgaccagaatgattcctttccgtattgaaatcggggtgggcttgttctctgggaattcaacatacgtagaaaatctccaatgcacgtcgccgactcgcttcggtgttcttcttgcccagggtaatcaacttctcggccaggcgctgggcctctttggccttgggccatgtcgtggtgattgattcatgctcgaagagggaggtcaccaggtttcggagcagggcctgtcgatgcgcggagtcgcggctcaagtggcggtatctgcttccaccgccggccatgatgagggctattaggcgaaagtaaacgaggcagatagagagagagcgggttattgaaagtagagtgggaatcacgaggtcaatggctcactaattacaggtgaaggagagccctggaggatgttcggcccagaagaattgtctcggccaatcggagcgcttccaccatctgtccgacttcagttttccgcgctcactctgtctggtcgacgacattcagcttttcgaatacatttcacctaaacctattgattgccgaggacagcataggctataatcaagaaatacttgtaccatttgtcgcattttcaaaccactcccacgaacaaatagacaatccggcgactccaagcaccacaacaaatatgggcttcttcactggatttgtacgatttaccctcgaatatataccagaaagcaggactaactacaattcacactcgaatagctcggtggctttgcctttacctcatccgttctctgcattaccatccaagtacaccgctcaacacgcatatcacaacggaatgccatccacgcgcaagtcgagcaaatagactggttgaactcctctgctggtgcctatgacaggcgcttcctaccagaagacgtgccaaggtggcggcgtgaagaattggaagcgcagagacaagcggagccgactatgaaggagatatttaagcatagatggaataaagaagtggaggccttgacaaggaaggcctatgagacaagatgggaggatgtgagacatgctgccgcggaaagctggaaggctgctgcacgagtggtgaaaagagaatgaaggatcatttctgaaaactatagcaaaggcttggctcgaaggaatccttagatgtattatcatgtccgcttgttttgggtttatttttgagcaccggagtttggatacccttgatttagttatgttataatttacatgcattagtattattatttccccgagggatattgtgaatgcgtccagcgcatcctcgtataggatagagatatcaatgcggtccggcaagactcggtgatagcccggatcaaccctgggacatgtacactcgccactgaagaataaaaaaatgcagcaaatgcagcgagggcgggactgcagctgaatcgactggaagactcagaagttcagcttgtattagttgatgacggtgcagttgtcgtgacactatctgagtcgctccagatatccttgctttcccgctcgacggtgcgcatggcctgagatacctcctccagtttagcaacgacatccaaaacgccctggttgacccggtcaaagtaccggtcattggcctcgcggcgctttcgcgcaagacggatgtctttctcggtctcgtcatccaacgtacggtacgataccgaaccttgacctgcgctagcttctgtcgctgattcatcttcaatacctcgccgcgccaagctagcttttccactggcttcttcggcaccgctgtggccgggatccacaacttcatcgtctgcttcactacgtgcccaggcttgggcgagcttcaactgtttcatgcgtaaatcttccaatgcttcagagtgctttgcgccgaagacattctcgctcgtcacagcgctaagttccacttctgacaaagcgttctgcatctcctgccagatggcatcggatccgtcgacatcatgtttggaggcgcggcgtgatacaaagggtgataacaagctcgacttctcagtatttgcgctctcggctagccgagatgaccgattccgtttcaggggtgggggttggccagaggcagttgctaacggtgaggttgcaggtgggacgggtaaggagatattagaggtattgtgtgatggtgggccctggaaaagggctggaggaggcagacgttgagggtttggattcgtgggttttcttgacaaatccatcttcaacaaatgttagagagaacaacaaacattcggcatccgaatgaggttgatgatgcagctgataaggttatcgttatcggcgtgatgacataatcagatgtgggggctacgactgtctcgtgactcgcttagggctaagcgcacaaagtcacctgaggtgcatccaaagcgtgtggtaagggaaatccggaactcttcgacttttcgacaatcgaccctcagcccctttggccgacaacacccctcccagtcggtacgtattcgatatcctgctatttcccctacgttgttcgtggttttcggaaatcttttattcgtggcactgcgagatccttcgtcaacgatcgcacaaaaaatcggccttctccaaacatcgaacaccgaccgaaaatatccacaaccagcaaaacaaccgttacactcgacacgaggctaacatttttttccttgctcagttgaccgtcgaacacatactccgccaacatgggtaaaggacaaccccgtggtttgaacgccgcccgcaagctccaggcgcaccgcaaggatcagcgctgggctgatgaccacttcaagaagcgtcttctcggaaccgcctacaagtcctcccccttcggtggtgcttcccacgccaagggtatcgttctcgagaaggtcggtgttgaggccaagcagcccaactccgctattcgcaagtgtgtcaaggttcagctcattaagaacggcaagaaggtcgctgctttcggtgggttatcctcttccttactgctattgttggggcctacacgagttggaattacgacaagatggaaccaccaacacaaccaccacaaacagatgctaactggcatgttcttacagtccccaatgacggttgcttgaacttcatcgatgagaacgacgaggttctgctcgccggtttcggtcgcaagggtaaggccaagggtgatattcccggtgtccgtttcaaggtcgtcaaggtctccggtgtcggtctcgccgctctgtggaaggagaagaaggagaagccccgctcttaaacaactcgacgcgttctgttcgaaatcaaaaatgcagcgaccgggagccttggagtgtgggaacggtgccggacggaaagcccgcctcatcagcgccttgatttcatgagatattttctttttggggagtcccccggcgggcttgcgtccggaatgtggtggatccgcttatttgcgaattaaacacgattgatacaacctccaaaaagattatggcgccatgactttctatcactttcccgggtttctgaccttcctgtatactgttacttggttccttgatccttgctagagttgtctggtggagacgcaaagtaaagcgtagggtatggtgttgatgtgaacacagcattcatgagtgatggtctaaatcttcaatacatttgatctgtaccaacatgtatctatcccatgctctaggccttcaagcccatttacccgttgccgaacgtcatccacccgtgaacgtgtggagttgttcaatgatggcaatggccctagtagttatatatgtgtgtaccgtcttagtgtagctgctcgtggatatatatccaacctacgtgtagtgtggccactaggattccctcggtattaatctcgaataaactacaacgttagccccgttcctacatgagtcaggttatatcgacaaagatgcacatgaaggtctacgatccctttagtcttccgggaatcaaggattggaaagcttgaaggaccgagagaaaggtgcaaaaggaaaggtatgtaaaagaatcggattgattgccacttgtatgcttgcaggtcggctttatatgtgaatatatatcaatgttaccctcatggttcgtatggtctctacatctagtccaatcatagattaagatactctacactcctaccagtattcgatcggatctatatactaggcaaagctcaatcacataacgagataagcgagagtccaacatagcggctactcataaacattcgaaatcataaaacttagttccttttattcattactcctgcgtatcgatcgtcaaagtaaaccctcgggtatcgttcgggcaaatgtccctcaaaagatcttttattgattttcacgacctgtgacacaactgcctaaaccaactacagcttagaagctgatatcttctttgcggtagtggtctgagacaatgcggtacaggtatgatggagcatggccgccgctggggtaggaaaacaaggttagctttatggaatgagataagcgtgtgggatgggtgcttgaaacttacaggttagtaatgtaaagatcgacgagctctgcgggaacgtagtcatagatggggttttggacatcgattaggtcgacgagatcaccttcctcgtatgggaggaccttgctcgggtcaccgtattcaatgagtgagtcgaagtcgaatgggtagactgggctgagcttgtaaacaccgctcacgaccacgacgggggtctggtgaaccttggcggcacgcgcgatgacacgggtgccagccgcggcgacaaggccgccgttggcgaggacggagtgtgttccgagaatgaccttgttgactcgtgacatgagagcgaagacggcagagtctgggatgaggatgacggtgatgccgtgctcgatcagtggcttctggaaagcctccaagccgatgttgtcatcgtcagtgacagcgctaccgctgacagtggcgtgtgtgtcctcatggttattcggatacgactcggcatggatgacggtaaacttgcgcttcgcggcggccttaagcaggaatttttggacagtggtcgaggatgtgtgggtgaggatgatttcgttagagtgaatgtggtccagtgcataagcggcgatctgatcgtcgacctggccgagctcatcaatgatctcgccaataccctccagcacctcagctcgtacgtctttgcttggaccgtggccagggaggcgtccgtttggagaggaggatcccggggtgctgggaagtgagtgctcgggttcgggatgggacagaaggctgaacatagaggtcagaggggggcgagaggatctttcatcggaccggaaggagggcgagtcgcgatccaaaggcaatgatggatctatgaatctatgagtcactgcgttgatatttggaccaaaacttgggacccaccgtcataagcccggggtgtttggggctgactctctgagccaatatcgctaagggcgaactcagcgtcgcgatcgtcttccgcttcgtcgcgaataagacctaggacccggcgcacgatattgcccacaaccatctcgcgcggttgcgcagccattagtcgcctacccacactctgcacccgctcaataagctttgctgaatctgttgtgcggcatgcagagataacgcttcgtagcaaataggcggttgctgtagcacatgatcgcgaatggcggatttgacgtcgcttgagcaatctgattgaaatatactatgttagcgagtttgatcgtcggtaagagtagccgtcatgacaaggagtctggaaatacgtacgaaatcagagtctcaatagaggtatcaatcgggtttgtcttgaggcacttgaggaatgaccccaggcccggcgtcagggccaacgaggaagacggcatgaggaagtgggatgttgggaggaaatctacgcggtgtcagcgggggttcggcgacaggagtatgcagtgtcgggtaatagacataccaagtttcagatccagatcacaccgagtatgtaaatagaacgatgagcaagagattctcagattctcacacgaagagccagagagtgggagagacaaagaatgattttctgccgttcgatcttgtccgcttccccacactcattgatcctcgctctattgtctcggcttcggctttcttattggtgttttgccagtttttggatttcaattatttcatttccgtttttggattgctttttgtcggctttgaaactcgtggtataaaatcagattggagttgcggaagtacttccgaggcacgggtgacttggcgcattgaggttagaacaagcttacacctccttgagatccccctctttccttcagactgccatcacatccctacacactcatctcatggaccgctttaagtggctttgatgagtaactcacgatccgtttgccaatagatcgctgcgcccctgtctcccgtgacgccttgaggaagatgaactcactgaatatcctgtcctcgcgagtcattggccaatcttccagctcttcacgccacagatcgcagtcccaaagtgatagcaaacgtgcatctccaccgtcagacctctcgaaagtccggtcttatagcgaagataattttcggtcccttgaccccactgaaaagagctacaacgatagaccgctcgtggacgaagatggagaggaggatggtacatatgactcggacgagaagaccccgttactgcatgaaccccacaagaatggcacgctcactgctcgaagtacttggcgactgatttcccaacggtttttcgatgcgatcacggaaacgatcaagttcattttgtctacgtttgctgcacccggtgtgtatttggctcaatactttcagaccgacgatggccactactcgcttcttgcacctgtccggaaattgcgacgctccccatccgaccaagccatccggtcggctaaaggggccatccgggtagaaggtcggcgtcgtagtggctccacccggaagctccgacctcaaggctctcacgaatccattgtgtcaacaacgtcagagtccgacacagatcgacggtatactaaaaatctttcaagtgggaggaaccgacctaccaagacaaaaggccgcgatgcagattcaatcccagaaggggcggagcatgagcacactccccgtcggtctatacgaatcaagctccataatgaagaatctctcaagcggcagagacaacgaagatcccagagtgcagacctaggacatccaatgcccgagggtgtctctcgtgtccaaggggctgtccacctggacagcttaaagtccccaacctctcccaacatccaccgcataacaaagtacccacactctccaactccaccgcgcccactcctcccgtcacgagtaccttcatatactgcagctccccgcaatgccagacctccgcagaagaccttggtgcttgatctcgatgagaccctgatccactcgcttgccaagggtggccggatgtccagtggtcacatggtcgaggttaaactctcgatacccacgactgcttcattgtccccgggcggaccgcaaacgacactgggccctcagcatcccattctgtactacgttcataaacgaccacactgcgatgagttcctccgcaaggtcagcaagtggtataagctcgtcatcttcacagccagtgttcaagagtatgccgaccctgtcatcgactggctcgagcaggaacgaaagtattttcaaggccgcttataccgacagcattgcacatttcgtaacggggcatacatcaaggacctgagttctgtggaaccggatctaagcaaggtgatgattttggacaatagcccgatgagttatattttccacgaaggtaatttaggtttatctatttgggtgcgcttagactaataatcatcgctagataatgcgattccgattgaaggctggatcaacgaccctacggacaacggtctgctccacttgattcccatgcttgaagctctacaatatgtgacggatatccgggctttgttggcacttcgccgcggtgaaatcgagtcatgatcgttatccacatttgtgtccatgaatgtgcgcatctaggtgtataagggggggttttttttttctagaagcgatatgcaacctttaaacctgaaaacagaaaaaaaaaagatatcacggagcaatggagggaattggagaccgaccgacatgatcatgcaagcgcagttattcataatggcatccggcgtcttgtttgactaggaatggaaatccgtacatatgaccatgaactctcctatgaatgtaacacaacacataagaggatgatgtcctaaaatcccacggaaaccgccataaccttaccccctctggtactcgtgtcatcaacaggaagcttcgtcccccctccagtagtgatataaagaacattacgatatctctgtgtccgcccaaaagccgccgatgtagcagtcatcaagtccattgagcccttcaaacccgcgatcaactcatgatatctattaggaaaggccctaataaccacatcatcaacaagacccgccaaatacccaaccccatgcaggccaatagcgaagtcatcagcaagtatatcatggctgataacctcgtaaggccccaaagcacgaccggtatgtgtatcaatttgaacacgacagaaaatatgcttcgggctgttgctgtagtacatataatcgtttactatcttcaacccgttaacctcaagcaacaaacccatgtcatgatttgcggccattgtttcgtgttggtggatcactccgtacgtgccggtgcggatatcgagacgccatataaggccgagttgggagtcggttatggcgactgcttttccttcgtttagagcagctatgccattcaaatagtcagcggggagttttgcgatgagaattggctcggcgcatttctgtggtgtttgagatcgaccgtccagactgagttggatgcaatgactgcatagatatctggtgagagctccgtgataccatctgcgtcttcggcgccgtcaaaatggtggaccaaattggctgagctggggcctgatggaattgaagggtcaatttcccagagttctgctgtgctcagtactgcgactaggaggttgccgtcgggtcggactgtgatattctcgacccaggtcccgttaggggatctgtggatttcgcggagattgggagagtgggcgaggcatagagtgtagatgaaggtaagcagtaataatatggaacctaaaagattagccatatgtggaaggtgtgacacaaggatctcaaataaccaagtatatgggaatcattgccatatataggaagtgccagtttcccatttcgcaactcgaattaggtaggtttcccggaaaccgtggccatgtatgtagttaactagttacaaagtggtgcttggtaatatgctcttggctgcattgggctcagatggtcatacagcacgattggtaatatgctcttggctaaattgctgacagcagggcgcggagtttaccaccggcactccactggcactccactgcagcctgaatcagaatagtaagtctaggtatcgagtagtcctaggcctagatataagcgtcgatatctgacatgcaaagaaacagcacgtcgcagaaggggtcgttgggtgccaagttaaagtcccagcgtggcaggctggggcttttgctgagacttctgccttgacaagaccttttccttctctctcttggtctcctttgatggagtaaaaaaatatagatgtaagaacccaaagggaaaaacgaaccgtctatcactgtctgactgtattcggattttagtttgttaatttatgctttttccgggtgcctaccgagtgggtcacaactcacaaatataattggtgggccagcctgagctgccaatagccaaaagttaaaaagtcaagtcgggacccagtcaaagtcatgacgtacaataagcagcctacatgatgctcgaacctaatagtacatagatactgagcacacctctagagtcaggcttcttggcgcctaaggctgcagtcttgggggtttgaaaattgcagatggaagagccgtggacgaataatatctatatctcaatctctcgtcattctaggcgcgaatgacaattacaacaggtgatcagcaaaggatttgtctgtagtgcgtttttggtaactaagccatgcaccacgcagaatttcaactctcctctcctgctgtgacttaagcgaccccgtttctgtaaggttacatcttactatgcacaaatccctatggtgcatctcgtttgtaccttgggtactgctggaaaattgtgctaaatttgataacacgagttaagagacgaaaagccttctccattttcttcagttgacataacgacaatgtcaattcgcaggctgtccgcgtaccaacgtcatgccagagaccaaaaattgttgcgattgaatgagaatggcacgtttcaaatatcagtttttagtgacttgcatttcgctgaaggtatgctgacagactcttaccgttgacttgagatagtaactatgtaaagatgatatagcggacaacaagaccgcaggggtcatgaaatccgttctttcttcggagaaagtgcaactcgtggtactcaatggagatttaatctctggtgaggccacccaaaagtctaactcgagtctttacgttgatcgggttgttgcacctctactcgaccgtggtataccatgggcatccacctatgggaatcatgacagcgaggtgaatcttgatccagaagagatctttcgtcaagagacaaaatatcaaaacagcctaaccgagagaagggttctggaccccgctgccggcatcacgaattattacctgccaatatttccacatgaggcttcgaatgacactatcccagtatttatcttgtggttttttgacagccaaggtggtcattatgcattgacagaggatggggatggcgaatcaaccacgagacagaattgggtagatgatacagtaagtatcaccagggctctcacatgttcccatgcttgatccaaaaagtcgaatgcttggtcaatggacttggtgtcgagctttcacatactgacttgttgcaggtcattcaatggtttataaaagccaatgcaaacctaacgtccacctacgggcgaacaatcccatctctagccttcgtccatattccagttcatgcaatgcgcgccttccaaaaatccggcgtcagcccggtcagggaaccaggaatcaacggagaaagagtccagcaacaaggctacgatgccgagtccggctaccattctcaagacttcccatttataagtgctctgttaaacaccacggggttagcagcaactttcagtggacatgaccacgataatgactggtaagaaccatactgtgctatacattctcttctcaggttgaagtcaaaacgcaaaaacgcctcatttgactaataataatccttttcataggtgcttcaagtgggatactaagctaaatggcctcaatgtgacgggaaatggcatgaacatgtgctacggccggcatacgggatatggagggtatggcgactgggcgcgtggcggaaggcaggttttgttggataagcgatcgcttggggatgatatacagacttggattcggatggaagatgggtcaatttcaggcgatgttcatctcaatgcgacgtatggccaagatcaatatgggctggtgcagaggagtttcagcgggcaaaatggtggtctttctccacacttaaatgttctctatttgtggatttgtatttactgggcttatatgcagttgaactgatggtcaatggttcggaggactctataaatctgttgagttgggggactggtcatggttggctcttaggggatatgcgagcgtgtacaatttgttggagcgacacagttcaccttgccctgaggactagcaaggcctgaaaacatcagctgggagtataatggagaaaaaagaagattgtagcaaagctgtgaaatctagaggcagctattgacgtcgggatcgaatgcttatttatcattgggtgttttgtgctgtacgaagtacatatgtatcggataatgcctgatactctcgagacctttcctttgcgttttagtgctcaccccttgccgctttttggtcactgagtaaaactgagcacgtccctgagtatcctgaccgacttgatcacaggccattacgtaatcaactgatctgctcactgagcatcacctgatcatcccgtgaatacacggcgaccttcgtgctcctccgtactgtttttggttggagagctgagtaagtgtcctttgaagtatttggcgcatattttgttgaagtcatccagaagacattttactactggctcacaatctgcagaattggttctatttttctgtggacgtctctaccgctactgtataatgaaataactatttggctggttcaatgccttggtgacattgtagcttcctaaaaaagtatctcttttctgaattgactcactcgtctccaccatcagcccccattgccgccaacatctcttccgggcccgcagctaagaacatatgatgggtcatccagtgacctttctgaattgttgccaccgcgcgcggccgcatcgcctcctcgtatgctaatgttgccgactccaggttatcgatgccatgagaaatgatgtgcctcgccagatcgacgctatcatgcatagcattgttgactccatctccagttgggactctatagacaaagaacaaaagtcagaggtaaactctttcccgtggcgatccaagaagaaaaaggcacagtttagtatgcacttacgtcaaatgtacagcatcaccaacaagtgttactcccgaaacatgattccaggacgggattgcatcctcggccatggtgtataatggccatgagcgaaacttgccatcgcatgaccgcacgaagtctgtcaggtcataatcccagcctgcgaaatattcttgcagcacggtattccatagggccgatgcactcgcgaggatggaaccttcaggtatacttttctcagaaagccttagacccacagaaacgtggtacgacccatcaccgaggtaatataggaatatttgccgctctttgccaaaggccagataatttcccttccctgcctttgaggcagccaacgggtagattgggttgtcgggcttgatataagaagaaaagaaatggataccagaatactgcggctcggagggcataacctatgacaatggtattatcagccaggaatccgacacctccactgaagccatatcgaaattggagactttactcactgtcgctcgaatcttagaccaggcgccatctgcgccaaccaccagacgaaaaccagatctagatggctggttctcgaaatgagtcgtgacagatccattgtcaactctctcaatgcgttgtaccttgtgatcccaaagaatcctagacgccggaactgagcttagaagtaggtctcgcagatcctttcgatcgatctctggctcttctgtgtctccctcgcgggaatgagaaacatggaccttcccttgagaatcgactatagtgagtggaacaccaaagcgcgcaagggattgaaatcttggaaataagccggcttcgaggagagcggcctggccagtggtagggtgaagatcgagggtaccaccgctctgatgttcattcgcccacgtggcagagacatctcgttcaaagacaacatacggtatttcagcgacctccaagagccgtgcgagagtaagacctgccgggccagcgccgacgatggcgatgggtgactgtgactgcgtcatgttatgagtgagactcgaaaacaaagaacgaaagtttcgatgaagatgcagacgagaggatgagagatgacatacttatagatttattctacgtcagttaaatgccggaacttgtgatgtcggatgttagaacacttcggaagttactgtaaggtgttgcgtttcggagtttaagtccacggctcggaggttacggacccactctaaattcactttacttattcgcgaacttccgtaacctccgactttcctaacgcccgggattatttaccttcagttacgtccgacatcaaaatggctacaagccagggcgatgaggatactgccctctccaaatatgcttgcgactcatgcagatcaagcaaggtaagctccgcgttttcacttacttccgcgatcgagagatggaaacaaactaaactacctccgcagattacttgctcccgtgaacggaatagttgcgaacgctgcacgaagagaggaattccttgtatctactcgcgtgtaggcatcattcgtcgtgctagaaaacgcaagcacgagacacagcaggctagcggtgcaatcgcaactcctcggcccgcgcctgggtctgatgatggctcggcttccaagatcctgcgaagcgacggtcgcccacagtcatatcttgcctctgatattgaattgaccgaagaaagcttaggcggttctaaaagcccgggtcagcgaggtccattcaacgcgctgctgatgctgaacgaagccagtacagccacgactgttaacaacgagccaactgtgctggacagtgcgaggtctggaaagacaacacgactttcattcaagaagcactctatagaatggtcgaaaagtatggagttcacgaaaaccgtccactgcgcatatggttccagctgctaatgatgccattagtttttgagaacgccttgcgagataaagaacctttgcttagtccggcacctcctgaagtggtacgctctctgaaagcgtctcgcccagatgagattcaagaaaaagcctggttagtgatgtactactgcattatattgagagtcaccgacgctgtacatctcaaaagccagctgcgacaagagctctgggcctcactcggaaatattagcgtcctgatgaaaccgagcgacgcgaacatccaggctattctcatggttattggtctcgtaccggacttgatagacccctcattatgctggatgctctctacaagcgcctgcaggatgttacaagccctgggtgttacccacagaaggatcgacgctcagaatcgggaacaacggcggctgagattctggcagcttaatctcgttgacaaggcgcttgctgtcatattcggtcgatctccaattttccctcagaggatgggcattgaggttggtcttccgacattggagcagatccgaccatctacgcagcaccggacgtcagatggcagtaaagggtattttgcatcgcacctcatgtatcagaaatttctgctctcaaaggttatggcagatatctggcagtgcctctacggtgaaatagagagccaagatctcgaaatagagtcggtcattgctaacctcgaatcttggtatgaacaggcacacaaggtatgtctcaatcctgcagggtttgccttcaaatgcagttaatgacactttaacccgttgcagactcttgaagctactgcgatatctgaaaagccattttgcaatgcacaaaatgccaagtcgatagacatcggtcttcgcagccaggatttccattacttttatctgaagatccttctgtttcgaaaatccccaccccggcgctcccagtgcatcactagctctaaggaattgctcaacctgcttctacatctatccccagaatcagacgagccatatcacccttttctctggcaatttctatactctccattcactgcatttttgttgttatttcgtgacattttactcaaccccggccgtgaacctaaggacaatcaagaagctctggctgctatggagaatcttccggagttcctggaaaagatggcctcgcggaatccccttgccacaaggctgagggaagtttcaagagtgctcattggccatgcggagtctgcgttgactccaagtggacaatctcgagctggatcagatggtctagtggcagaatcgactttcacatcgagtgagacagcaagttcgttcgacatggatctattgtgcaaccaaaccacagatgcggcaagaaatcctttctgtgacttaaaaacagatgatatattcgaatcactcactcaagattttgagggaaatggactatttgactggatgacttggctgggtgagacgtgatgatatcatgcggatacaatgaaggccggaagacccggcaaagatgcgctttcgcaaagatagctctatgcagaatcacggtcctggttttctttcgtggacgctaccaggtcgacggcgctcaaattgagagttcaggcctacgggaaagtggtcatcgaaccggctgtcaacttaagccatacaccggcagctaccaaaaacagactcgttccgcaaaggtcatatataacacccacttagagtaaatatggcccatgagaaagattgagtgcgctggaccctatgagagcaacagaagggcagtacagcagcgagcgtggattgagctagaccgccaggggcaacgaccccgccttcagacgcccctgtctagaacattctgttcagatttatagtatttaacagacgccttgaacctaaaacatcacaagacacaatactgccaagaagcgaccgtttcagcgtaaccaaatacagattagcgtatactcgggtacgggccgagaaacaaagtcagtatgtctaaggggtaatctgttttcgaaatcgactgtacattgcagagaggatcgactgtagcatatccgggtatcaggcttttgatcgactggacttgtataagactgtatatttggtcgattgtaaaccagattgcgagcggcactaatcgaacgaaaatgacgggacgggccgagacatgaacccctgaaccgcccgaccgcgacgttctactagaccgcctaataattatgcccaggagtaaaaactcgacattgaacaaagtaacgcgcgttcttagctgaagaagaagacctagggcaagtgggtagcctaacatgaagcggtagcctcggaatcattaacagagagcgaggacccgaacgtgttagagctgttaaaggaacttgtcaaacttaggaaggagattagatagcgagatgaatcatataaggaagagctttgaaaggtcaaagaagagtttgccgcccttaaagaacagtttaatactgcccttatagaagtttgacacaagctatagaccctagcagatagacccgcgatcccgtaaccctacctcgagctatattcttagaataaccacgataagatcctatatatgtgtaaaggtatacgttatgcaggtgtaaggcctgtcaaccgggtaagatacaaagggctttgtggagggaacacaatgtatnnnnnnnnnnnnnnnnnnnnnnnnnngcaggtgtaaggcctgtcaaccgggtaagatacaaagggctttgtggagggaacataatgtattgatgatgtgccaagactaattcttgccagtctcggggtcccctgggggtcccaaactataaggaaatctatctgcctatgttcatgtgacgaacctcctttccttagagaagaatcggaggtaaaatgttcttgtaatcggtatattctgaccttctactgatggtatagattttaaaattggattattgaattagaaaagtcacaatttccggaatgtttttattgtttagggcccattgggcccccactagcctacctcaattcaggaaatatatgtgccacaatgaagaaattgagccattgaatttaaaattgcggaattcatacctgtaaggataaagctcatcatactggttgcattgatgtagcaagcaggctggttagttgacaatttaaagacagcatattatccacgagcttatactacatcgtgcttttgatattctacctgacttgtctgtaccacatatttgtttgtggctctcattagaatatatagcgcgtggatgagcatagcatgcatgttcattttccagactatgagcgagagcaattccatgtgagggcagtagcaatgctatcaacgaactaactatcacagtataaacgacccggtgggggctaatcccttctgggtatagtctgcagtaagctgagtgcatcagtgttactcactgattggacactgggcatcactgagtaatccgggagcatccaatgagcactcactgagcacttactgagcaacagtcattctacacgtgactgaactaagcatgatcactgatctgagtccgtactgacatctactcagtgagcctgagtctgagcaccctcataaaagcggcggcagatcaaataggaaagccccacacgccagggaaaatccggtacatatagttacaatatgtatgtacctgtgccttggctgttgagagcgaaccatatagatgttacttagaaaggggtgttgtctcagtcataggtttcagtcgcatagctcaaagactacgccggagacaataatagtgattcggtagttacttttcacaaacattaactctagcctatataaatctgtaagttgtggtcgcttatttccgtttgcctcggttttgcgggggagtttacgatgactcgcatgtcaagatccttgattccttggcgagtctcaaaagacaggtgggttacgcagaaaacagtctatgtagatgaccaaacccatgtgaaacccctggttttttcgaaacacagcccattcgatcgtcaaaagaagaaaactggctctcccgcctctgacgtcagagacccctgggcggccccactctttctgccccgggtccacggttgtgaattaccaaacgtccgaaaacggaaacattctagggcgtgaagagatcgcaatcaaatgaggttgaagaacaatatctcaggctaagatatcaatcacctaccttagtagctagggactctcatacataagctggcgtgaaacatatcttgtaatatgtgcgtaaatcattgaatctgaaagccaagaagcctaggttccttggttggatccgtcgaatagcttgtcttgccctctttacacgcgttgtatggcttggcatatgcatggtgaccgagaaagtggggaattaaataagccctagcccatccgaaaacaaagaccctatattattcgacatcatctgtcgctgatctgttgctgatctgtcgctttcactcactttatcccgtaataatatgataaattgacctgctaatgcttatcctacccagccatgaactgcttagttgactgcacgcatacaaacgacatcgggctatactcggctcagccagtggcgaacgatatgatagatctgctagttgatcgtcggtgaggtctttgcgaaaccaaccagcaaaatcttgctaccccacagaaaagtggataaggccctgaatcctatttttaacatggaacttttaggctgggggtcttctgctcatacatcaattattgcgccgcatccccaacccccaacctcctttgacaagcaaggtctcgccccatttttacttcgaatcgcgagcacttctcattttagattgataccatctatgattgatctaggccgaaatgcacttgtccggaacatggtctatccttaacggtctcatcacaacactcctcttttcaacgttaacgcctgcgatcgaattagacatcagcaataaacgtacgtcacggatagtcgaagctattttccgataaaagttgttatgggactgactccgcaatcattggacagaatcaatcaaagatgccgcaagtacgagtgcttactccatgttgggatggtatgccggcaacgaaactggacaaattcctggctctttccccgaaaaatggtgggaagggtctgctctttttcttgcgttgcttcaatactggcacttcaccggtgacacgacctataactctttgacgagccaaggactggagtggcaatcgggtgataagggtgactatatgcccagcaactatagtagctacctggtgagcaccatacatcaatttcgaattctcgcgacgaataaccagttctctgactattctcgaatccctagggaaatgacgaccaaatgttctggggtctcgcagctatgatggccgccgagctgaaattccctgatgtcccgggccaattctcgtggctttcgctcgcacaaggtgtatttaatacccaaaccgctcgatgggatacaacaacatgtggtggtggcctgcgttggcagatattcccgtaccaggacggatataccatgaagaactccgtatcaaacggcggtctgttccagcttgctgcgcgcctcgcccgttacaccaatcaagccaaatactcaaaatgggccgagaagatctgggactggtctacttcctcaccgctagtgaacaacaagacctggaatgttgccgactccacgcaaatggcaaatgactgcgccgatgttggtaactaccagtggagctacaactacggtacatacctgatgggcgctgcctacatgtataactatgtgagtggaacctcgatactcgctatttacccattacatgcgcccaaatcttctatttgcagacattaacattccacctgtacagacaaatggagatgaaaagtggaagaccccagtagacggcctcctcggcaaaaccctaaaaaccttcttcccgaccggcgacatcttcgaagacacaacctgtgaacccaccaagaagtgcaatttcaacgagatcctcttcaagggcctcacctcatcatggcttgcattcaccgcactcctagtccccgatactgcagcgcagatcaaacccaaactcgcgagttccgcacaagctgccgcgaagtcctgcacgggaaacaacaacaacacgtgcggcatcacttggtatcaaaacaagtgggacgggacaactggaatggagcaagagatcagcgcaacgaatgtctttcttgcaaacatgattaactttgacaccggcacgtttgggcccgtcacttccaagactggcggaaacagcagcagtgaccctaatgcgggtgaagggaaaggaggaggggatgacgttaaggagaagcctactacgagtggggataaggccggtgccagtattctgaccttgatctttgtctttacttgggctggaggcatggtttggatgatgctgggtgcttaatttggcggtatatttatttaattggcattttttcttagaggactcggagttctgaaggggacttgataatgtttgtacataccatctcgaaatcttttactcacctaaagcaaaataggatacccacgggtggatagcgtttggaaacggaggaatgaacttgaagacctagagtatggaatagatgattatactataatacccaggcatagagaactacaaaacatcacaggaagccgaattatgtagacagatagatcgtagatttacctagatcacatcaagtccatgaatggctcacaccaacaccatatctcttctttctctagctagctcaattcatggtttcctttcccttgtgcttctgatacatacccatccccggaagctcccatcgccccgaaagacaaactttggtctctgatgagcgacgccatatcactatatcgatctccccaacacccctctattacggcaccaccagcaagaccatcaactgaagggtattgctgagatgcaaagagagcatctactcgttcttcgtactcattgttctccgccacggatctaaatggcccaggggacttatagggccagtagccggtcattatcgtgtaaaagaccgacccgagactgaatatgtcaacagcctctgttgacacccatggtttggatggattgaaaaatcccgggtcggggagatgcccaccatctatatcaccaccatttgtcgatcctccaaagtcacatagtaggagattgagcttactcttggaatcagagtgtaatagaaaattgtccggtcgtaaatcggaatgaatgactcccttctggtggatatagtatacggcttctgctgcttgacaacaccacttcaaacgaagacttagatcaatatcgtcattatgctggtcaatgtaatcttgtaggttaccatcgctagcttcgtcaaagagtaatccacgcggttcctcggaggtaccgatatagctgcaataaaaatgttattaatatgtactccgtacattagatcgcgtcgtattcggctgacataccgtactatgctagggtgtgtccctaagatatcgaaaagtcgctcttcgacctcgaaactgtgtttgatatccttgacaaaggaggtagcgtctgccgtatcggaatgccaccatgaatatctagggcatttgacaatgacccccggttttagtcttacgatcaatgaagtcgaaccttgggtcaaggctttaccgacagaaggttcatagatgaccggattgcctattcgacctggcaaaatagcttgattttcttcactttctcccaaggcctggtttttggcgacagttggagaatcattttcggatatagggcgtccagaaaagaactcgtcaaccttacctgccaatccccagctgattttgtacccatttgcgccggcaccgtagcaagatatcaggggaagagggttccctggtttcaagacaaaatgaagtccaccatgtctcatagggcgccgagcaacgtagacttgtctcacatcaaacccattggtcgcagccagtccatctgcctgctcgtcaaccatctcggggcatagaattctcacccttttaagaatgacttcagtcgaagcatcgtcgatatcctcagacctaacaagtgttagcgtcactccaacctcgggaataattcaaaacataccagttattaggctctttcgtgccaccgataacagtcccaccacccagaggccggggtatgataaccgtagaggaaccatcactccaatgatgactgatagttctgtcacagtgattcgagacgatgatgaactgaccccgcgaggggaaagagtcaggatcattaaaccccctcccacttgcatcaacaacagccgaaacgtgatcaatctcatcctgggatgtattctcccgatatacagacacaacctgttctaggtccgtcaaatttgcgcgaataaagcgagtcccttgcgcctctgcgcgtgtctgtaaccacttcaaataaaccggcgagttcaggacccaactgcggtatgaaacacctagctggatagatggatattgaggggggtattgggtagggtcgagaatctggaagtccggccatgtagtgtagccattttcttctgccaggaacgaggtcgcgtcggctgtatcgaaatattcgactgcgggaataaaatccacccccgcttccgggtgatgtttcgcgatcttctcgaattcttggtaggtttgtcgcatccaggcctgttctcttcgttcctcttctgtttttgcgggggtggggcggaagtgtgcccctgcccatggggaggcgtagtcaatgccaacgtcaccgggtaactctctcgcgatgacggtgattttcaagtattgggatagtttgactgcgatgctgagaccgataacaccggctctgttgaattgcagttagtaggcagaaaaaggaaagtagacttggctctcacccgacgatgataacatggccttgactcatgttgattgttctttgtctttacggtagtccaaggtctaatgattgttttatgaatgaatctatgcaattgtccaggttcagatgttgcgaaatgagtcatctaaattcttcagggccgacacggccgcgggggcaagtcacaccgaacagtcatattgcggaatttgtggctgtcgaggggcaatcgaatcaaaccagaatggccataaaccacctagacattgttgtataagagaatttgttgtggactattttatggtaacttcggctcagcagctgtgtgacatagtttaaaaagcacacatagtagatatgagggaaaaatgtacaatgatctcctcaaagatacatcgccattgcaataaattcaatttgtgacttccacgcgttaagcgcgacgcgaaagcggtgtggatttgaatggattcgccatcgaagccccaaattcacccccgcatcgcagctcccacgtctagatatggtcgcaattacacagacagacagccagcccgacgctgtagacgaggaggcgaattatgtaaacgagactacagctctcctagggaccagcaagaccaagtatgctgacgcgcgcacgtcagacacactggacagttcgccagggccagatagcgacagtgacgacgaggaaaagcccttgcccaagttgcagattctgctactctgctatgcgcgcgtagtcgagcccctggccttcttctccatcttcccctatgtcagccaaatggtacaggacaacgggggcgtggcagacacggacgtcggcttctacagcggactcatcgagtcaatgttctccctaacgcaggctattgtcatgatattctggggccgagcagccgaccacctcggacgcaagcccgtactggtatcctccttgttcggcgtgaccgtggctacaggcctttttggtctagcaaagaccataccgcagatgatcatgtttagatgtcttgctggagtttttgctgggaccatcgtcaccatccgcacaatggtggccgagcacagcacgcccagtacgcaggcccgggcgttcagctggttcgccttcagtgggaacttgggcatcttcctggggcctttattgggcggtgcacttgctgacccagtacgacagtaccctggagttttcggaaatatcggcttcttcgaaaaatatccctacgtgctttcgagcttcgtggtggcgttgatcggggccaccgctgctgtgtctagcgcctgctttgttgaagagacgttgaagaaggagccggttgtcgtggaccgcgatggcggggaggcgacatccgatgcgctgaccgagagcggtgacctatcgacattgcagcttctcaaatccccaggggtgggtatggtcctatacacgtacggccatatcatggtcctcgccttcgcttacacggccatcattcctgtcttttggttcacccccgtaaacctcggagggtacgactttacccctctgcaaatttcattgatgatgggtctaaacggcgcctcacaggctgcatggctcctcctggtgttccctccattgcaaaggaagatagggtcgaacggagtgatacgtctctgcgctttggcttatccgctattcttcctactctgccctcttggcaacgtacttttgcgggtggacacagatggatccgttaaagccttttggattctcttgccgctcgggctggcgattggatgcggagtcagcatgagcttcacggcgatccagctcgttctgaacgacgtctcaccctcgccgagggtattaggcacgctgaacgcactggccctgactggttccagtgcgctgagggccttctgtcctgccctctttaccagcctcttcgctctgggggcgagaacacagctagctggaggccatgcgatctggatactcctgctcatgcttgcttcagggttatctgtcacagcaaaatatctaccagagccccgggccacgggcaagcaccggaacagccaggcaaggtgaggatggttcgattagctgaattcacagcacgatcaagacttcccagcgcgcacctttggaggaaagccgctttttcgcataggatctaaaatttgcaattgtctccaaaatttgtcatgctcgatgatgcctgtttatacagagaaaattcatatgtacgcattatttcttttaccgattcgtaccccgtacatacaacatattagagtatatccttttaaaaagttaaatttcgacaaagggattatttatgaaagatccaaaggaacatcagtgtgttatctaacgtcttttaactatatcatctagacctaagtcaaccggatgcagctcaccactaccagatggtggtgtttcgtctcagcttgaatataatcgcgagcaccacttttattacgcttggacctcggtactacagtctctattaaacttttggaacttcctaatcatggtctgatctagaagggtttcaatgtcactattcgatgcttgccctcgataatgaattgggaaagggacatctcattctatcggtcaagaacccatcaaattattcatccatatgttatatgtcttctgttccgcaaatccttttatgttgtttgttagctgttgtgccatgtctcggaaatctcaatggttttcttggcatcgaggaccttgagagggtagggctgggcagggcttggcgggcttggcagtcactcgcataaaggtttactgagcgatatattctccatccaatcgctttttttaattccccaattccgtcaaaatgctgcgtgaagcattttttatattcatatgcgtggcatgggcgggatttgctattcatctctcgccgtggttgaaggttagatcaatatcctggaactatactactgaggactaacgtcgtgtagggcatctcccacggagttgaagcttacaatgctactgcatttaattacccagtgccattgtctacacatgatgaagagcacacgcgtctactgcagaatcttcagcgatctagtgggaaatgggactctacccaccctcgacatcggttgttaactgccctacatggatatacccgctacaaagacaaaaacctggcggaggtgactcgatggaggaatctttacaaaaatgtcccaaagcagcagagaatagtacgatatttctttcctttcctcttgtttttttctttgcgggtgttaagtgggtttggctaactggcctagttgctcgaatcaaccatccactacacgcgtaaactcaacacaatggaacatcttcttgagacaaacaacgaactcgccagatctattgttgaccacggcctttggttctacaatatcagtcaatccgagctggacgaattcgtcgaagaaagcgagagtcagcagcggtccgctgataagactagcgtctcccagggaatgaagcattttgtgcgtgactgggcagatgagggccaagaagaacgtcaacaatcctttgggtgtatcttgaaatcgctcgcccagacaccacgggcgaacgaaagacccttgcgagtgctgttgcctggggcgggattgggaagactggcgcatgaggttgacaatcttggaggtgagtacataattttctatctggggaagtctcattggctgattggagattaggctttgaggtcaccatgaatgaatggtcaacatacatgaatctggcataccgttatgtgtccagtcgctcagcccctaacagtgaatcattccacccatatatcgactggtggtctcatcacacgacgaccgatgatctccagcgctccgttacatttccaaaccaagttattcgcccatcatctgtcttgctcatagagggagatttcactacggtattcgaagaacacacaggccaatacgacataatcgtgaccttgttttttattgataccgcacggaacctagtatcttaccttgagaccatccacagacttcttcgtcctggtggccgttgggtgaacctaggtcctttactgtatggtaccgctccatttgtacagttatcactagacgagattgtggccgtgagtgagggcgtgggattcgagtttcaggaaacagatcccacaattggaaataccacgttgcctgacttgcgagtgcgaggcttggaggtggcatatggtcgaaatgagcgcgggttgaataaaaatgcatatcaggcgcagtattgggaggctgttaagctctaggataggaatgaaacccatttcatatttgctgcgttctattacactctacaacatagcaaagtagctgtttaataccagaatatcatctgaattcaacctggttggttcaaaaacgggaggcatcatacgggatagggccagttaccaaccccctgtgttgacacacaatatctcgtgagttatccacctaatttaaccgatgaatgaattcgtttgccatatccaatatagtgatgccccttttgcctcagcccacattgactagctagcacagacagcatctcggttacaaggtttccggtgatgccgggaccatagctcagcaatatcgaccgatagtaaaggattgtcacgttaagcgaatggagtattctggactctaaatttacactaaaaacatggtatttttcctcggacaataaaagcatcaacacttggcaagctgggatcggcagggactgtatgctctgaccttccaagacggccaatgatacacccaagaaaagcaaagcgctcattaataaagcattactacccacatgcaccaccatccactggaaggccaattatatgttcaataccatgagacatcccctccgctgccaaggctatttgagaacctttggggcaccaagacttccacttgtcttggcctcgcaaaatactgctctctcggcggaatggcaggtataaagggtgcagaccctgtgcagcggatctctgaattcgcaaccttcgccatcgtcattacattgtgtacagccctcaaatcacctcgccacaatgagattctctatctttttcattgcgatgttgacttcggtcacatccgcggcctctactcaggaccccggtccatctcctactgcctcaattggctgtgagcctcacggagaccactggtttgttctaccccatcgtatgatgtctattacttgagggcacttattaacactcttctatataggcactgtgatggccctgcctcaacagccgtctcctcggccatctcctcggttacatcaacggcaagcgaggtcgaagcgagcactacttctgcggaagcttctccggcaagccccagtcctaccgagtctattggttgcgagccgcatggcgaccactggcactgtgatggaccggccgagacgtctagcacctccgctagcacctctacgggtacttccaccagtgagtcggctagtgcttccgacagtacttccgacagtgcttccgcgagtgcctccgcgagtgcctccgcgagtgcttctgccagcgctggaaatgaggacagcggtactggagcaattggagtgcaaatttccctgcttgttggattgtcgcttgttgctgctggtctgaatgtttgagtttcgatgactgtctgtgactgtctgtgtgtgtgtgtgtgtgcgagtttgttgctattgtcaaggcgaccctctcaaagtacagtgattttggaatcaatgcattacctatgtaaccctcgaatgttaaaaggatttatataagccgcgtatccctagttaactagttagttagtcatagtcaactagcgaactacctagctaaggcccttttcatggcaaaatctgcggtgattggcagttggaggtctatagggcgggagatgtcgaaattcttagtttgtcgccagatgagatttttgttagaagctaggttctacattactagataaaaaaataatgtagcgcgaaacgaacagtagctcaaggacaagaaggggaaaatgggcgaaatgttagacggtatggaacctagtagtacatcaccctacactaacagcatatcaaccatcaggattgacatattttcgagtgaatattggttcagtacattagttcattgttgtgatcaaggtgtcaggcttttctaatgctttttttttgcaacaaatgatgctacgacctcccctataacctacgcttattcgatactagtagaccatatattgtaaactagacgatacacgaccaatcaaaaatacgagtgaagcgggtcgcaactgatgacagccacagctatcaaaggagttgctacgggtagcaatgtgaattgagagaaagacaagtgaaagacttcgatggaggaatttcttttttttttgctacgtagaatattgaatacagaacgagtgtgggaagatccaggatgagtaaagtaagtatgtatagccagttcgagggtgatgtaaacaagacggaaaaggaaaggtacagctggattcccggagaaggagaacgatgaaaagaacagtcggaaaagaataaatggacttaacctccctaaggttccagccctagatcctatcctaatccagtgacccagaaaatcagaaattgaaagttggtttggttggcttgtaaaaaaaaacgagagcttcgtgagtagtaggttacatttaacaaagaacaagaccaataatccagaacaggagagggaataaatcctgcattgtacgctgcaagaggggaagagggagagagatccaggtacagtaagaggcagagtagaggtaacagcaatagactctctattcctgtccaaagccaagcgtttcctccaccgcaatagacattttgtgctcgagagcatcgtgcgtcttgtaaggagggagatcaagacggttgaagctgtgttgaaataaggttagctatgatagaccagatataaaaccaggatcggatacataccaagtatgcgacttgggcagcgcagcgggatcgccagacttctcgatggtaaaccgtctgggaccatcggatccctgcagatccttaaatccgttgacaggaatacgcgaggtaccagtagtgaactggagaagacgcgacttctgctcggcatcccaggtgcggacaatcttccagaaattctggatgacctcgtcctgctcttggtagccgcggtaatcggtgtgcttcttccagtcttcgacgtcgatgtcggcgataccaccgatgagcaactcgagttcgcgctcgtcgaagacgttgacgagatcgggtgggatgagctcgttgaagccggacataaaggcgtcgaactgctcctcgactcgcttcatgatcttccattccgtaaccaacctacgacatgattagcggggttttatcatgataaaggctgagatttgttccactcactcaatgtactgtggcttgttctcgttggtgacgggaatatcccggccaccgggtatcaaatcaatggtgcgacgctcgccaaacttctcatcgtcaaccgaaaatgtgagttccacaattccgtcaatgtcattatccctgtcatggtgttaatattgctcaaaatagaatcacgtaacaaactcacagtgtccatgccaaattccggtgcagatcctcatccacaccttccatatcttgaagactgactttcttgcgcaacatcatcttgtagaaagctccaataaagaaggaatccaggaaacgacggtggaagatagccagaccaaccactcggccgatgaacttgaaataattgagatgctcggggttcacgcccgagtggggattaatctgcaaggtataattatcgtgggcagagtactcgaagagacaatagaaaggattgaacatttcatgagagaggaggaagaagaattcactgtgagagttagcattttgactgataccggagaaaagaagaacggaacataccgcgaaagaccaccgtagtcgagaccatcttcgccatcgaacttgatcattaggcgcttcttaagatcggatgcgctctggcgcataatttcggcatatgaatcctcgaagatgttattacgacggactttaacgtggcactgtccggacataatgcgcaatgcgggttgggaccggaagtagatcagcttgcgccggaagtcacgcttgtactggggcacaccctgatccaaagaggaggggagtcgcggatcatcccatgtagttgtcttggtgttgtggtcgacgaaatatacgcgagcagtgttggtaagacgcatctcccagccgctgggaagaggacccaattgggatacgggttgctgttgaatggtggtgttgttcgcgccacctgtggtctgtccctggccgtacatgcggatgtactgctgccgacgaggatcgacccatgttgtcgtgcgcgtgttgtggtccacgaagtagggccgtccctcgggcgtcactcgtcgttcccagcctggcggaagctcccctgtgcctgcagtggtggctcccgtcgccatcatggagatcgcagcagcgttagacccggcgggggctccagttgccagagaggttcctgcgttaggcccgggtggtggtgtaggtgcctgctgggcatcaggcaggttgggtgaattggcgccggtccgatcttctggaagcattcggctctggtgggcccgacgttcgagctgcatgtttgcttcgcgctgagaacgctgggtatgctcgttatagttggccgatggtcgtgaccaggtcgtggtgcgcgtattatggtccacataatatgtccgtcccaaattgtcttcgcgccgttcgtatccggcggggagtcgaccctggctgtcctcaaaggagctgagattggcgcgagatggggcgccaggtccagggggattggttggggcgccattcgacgggggaggagcgccggctggaggaccggtggtcggagtgcgctggggcaatgatgaacttgaagctgcggcaggggtcgtatcggtattgttggggccagcctgtgattgagctgttggtgctgcaacctggggcacaaggccgctggaagtcgatgattgagcctgttgacgctgaagtccattctggttcggatgcggggcggtgaggtttgacgatagattgatgatcaattttccgtgaaccacgaggttgtcgttcgattttttcagatccctagtaagcatttctgtggggggcacatggccgtcaggtcagcccacgtttctctgactcgcgatcggcgttctgcggacgtaccatcaccacccatcgacaagtcaatgacatcgccgatgcgaacattgatgactccgaggaacccctgatccttcttcttgaatttcttctggtcgaagatttgaatcgcaagaatgctgtcctcattgactctcctgtaaatatccatggttaataaggttcaccctttcccctgacagcgggcaaatacgtacaaatcgaacggctcattccaatacggattcagagtcttcttgatcaccgaagttgtatgtgtttgctctcctccaacagtagcgacggcgaatggatcggggaatcctagaaagaggtggtcagttcaaccccgcaggactcgatcaaccgatccgaaggagacgacatacggaagacatcgcgtttgtacaagccgtcagccgcgataactatatgccagagatgttagtcttgtacggatgcggaaccccgcagagtcccacgatgattcgacggaacgacagtcttacttgtgacccggagatttggctggctataatgcatgttagcgatgatctgaagatccagattagaacagagcccgaggcgagtccaacttacgctgggagatttgacgccatgatgctttacaagcgccgatcaatcacgcccaaagaacagcgcgggcgcgcacattcacgagggggagaaggaccaaaccgagttcgcccagggtcaaagcctggaaagcgtggataggttggggatttgcaggtttggtgatgggtggtagtagtgttaagagaggagaaggaagagaaagaaagggttaggcgttaggtgcgcccggggtttgtatggcgcaggtactcggactacgtattcactatgtacgagatacccggtcagtacttcctggggctgagcacggtagatttctaacgttgaattataatctcgctatcattttactacataagcccatattgtatagccctagaaagtcatattcaattttttcccaggttaccttctaagcatacgtaatagagtaaatttagcgggtgtgggcgggtagagtggcaatttgatattaataggatggtaataaggaatatcacagctatgccagctaccccagctatcctggtaagagttacggctttttgtttaggcaaccgtatttagatgatgttcgaagttctttatatgccgccattggtactatagtatgtaccctgtacttgtaccctatataatacacaacccttctagttatacccccgtgtacattaaatacaactcccaaagccaacaatagccaaatctcatctcgtattcttttttttttttgctaattctttgcccggaaattattgtacagcacagttcccacaactccatacccacacatagagaaaatgaggagaggattcagttccggtcctgaaatcggacaccagacccgggatttccagaagcacgctcaaacaaaacacttagtagggcgagaaaccacggcctcggccccggtagggagcaccaccgcgatatccaccaccacgagggaagccacggccacgaccgcggccgaagccacgaccacggccacggtgcatcccaggcaggttggtacgcttaggcacgacctgttattcgacataagtgagtgtaaagagaataggaccaacatttataaaccgaccttcaagttgcgaccgcgaaagacactctcgttcaacaccagagcctgagcgactaggctaggttccgcaaattcaacataggcataactgcagcgccttgtcagctcatatccatatatattccagtccatctgttcagatctcaccctttgggctggccagaaaacttgtccagcaaaatggtaacccggttgatggaaccacagctctggaaatgagcctgaatttcctctggcgaagcaccgtagtcgacattgccgacgaaaatgctacgcgcatcaatatcttccttgttctcttggaggctctcggtttgctggtcgaggtcggcttgcatctcccgcagcttggcggcctcggattccatctcggccactcgtcgcttcatggcctcaatctcttcctgtagggatcaatcatgtcagcggggtatgccttgtatatgagaaaaagtatgcgacgttggtatgaaagaaatgacccaaaaatctcgaacaaagagtggaattgctttcaatgcagcggaacaaccctacctcgtcatctgcaccatcttcctggtgtggaatctgctccgccttgacctccactggaatctcctgaccttcagcagccatcttgtcggtaaaaaaagagaagtgttaagttgagggtattcgaagggtcggtgaacgcgccggtaataccgatgaggggagcaagtcagagctctccgagggtcggtataatctttacgcctcaaattttgtatatgaaaacgaagggattgagttgcttgaacttgggaacggcccaggtgatttgtacgagttagatccctctgttcaagacctctaggcggcagagaattgaagttctggggtttggcaatgagaggctttctatttcgggaatagcgcctttccgacgataaatcggcatactgccgggcggtatatacttccagcctcacttgacagggttcacttcactaaatgtcagactgggatatggccctaggccttaaatagggatctcggtttctgttatggtctagtggtaaaataagctgtatattttccacactaagtacaaacattcgccttttgaaaagtggagaaattgagtatctttgtatggcaccgcctgtacaaaagtacatcggcatgatatttcaattatctgaattcttcaccatcgactagatagaacttgaaaagaattatcaagtggaaaagttatagaccattggtgtttatggagtcctgtgtttgacatgatcttgttcctctccattgaatgttagtttaatcctagttcaagggtgcagaaattcggaccatcgagttatcatgcctatgcacatgttgcatgtgttgaaagtttgctagataagcagaaactccatggaccaggagagacgcgcgagcaagacataagagaatcacaaaacgaaatcagagcgagggattcagcccgtaagaatagatgacaatatcgtagcagattttgaggaaatgactcaattcaaggtatcatgtatcaaattgaaaaagcatgagatctgctacaagtcagaaggaaggagaagaacgtatgatcaggcgaacaccaaggcaattatgtacacggatgaggggaaaagtaggacaataggcataacttataaggacggcatcacgaagccggggggtggttcttgcggaaggagaccttctcaacagcgacattttctaccccattggcgtcggtcttcagctgatagacgtacaacacaaggacatcaccttggatctattcggagtcagcatgtacactatccttcaaatcaggcagggcaacccacgtccatgaggcagaaactcggtgtaggttcctcgtcatctggccagaagcccgagctcatagcacccgttgcgcttcccgggttgataaagaaccgaccctccatctcaaatgcctcgaagcggtgggtaccaccccacagcaggacatcgacatccatctggcgggcggcaataagcagtgcctcggcgtcggcgggtggcacgatggtgtggccatgggtgaacccaattcgtaaactgccatgggtcacgatcttagagagagcgaggttgggagaatcgacatcgtagtcacccttgaccatctgtaggtccggggctacctcgcggaggaaatcataggtctcgcgatcagtcaagttgcccagacaaagggtctggccgatcttgccaggggtcaggagtttgcgaaactagaatcgagagtcattatcagcatgctggagtagattgtgacgcaaaagacagacggaccttggctggaagatcctagacgacgtgttagcggagacagtgaagctgagctgaggacagcttacaggagctcggtcagggatgaacaggtcaccaatgaccaagaccaaacgggcggtcatcctggatggcgcgtgtggggtcaatgaagatcaatggtccatccacggtgattggaaatcggaaatcggagcaaagccagaaagaaacaacgcctgttggcttcagcctgatggagcttcgcggggaagagcaactaagcaatgccctaagccctattttatgtcctaatatggctagcgctatctgctctatgaagccatctcgatcttgattttctttcgcattggctcatcagaccgaacgtctcgtccgaaatgcttttcggtttgatgaggccaatcacatgctacacctctcttcgagggtttactcttggtggaggtcgccggaggagaatactacattggggttcgacaatcgaatagagtagcagttgccgggcagacatcggcatttggatttgatattatatagacattcaacgagagaacgagtgtagtattcgatactccaatctccaatatatgtgagtgaacagtacggagtacagcatatatactccgggatgatataaaatgacaaacatcctgcagaataccccagatattgccccatatccccaaataccctctatagaagaaatcatacggcgtgagactcagacggttggaaatctcactcggtaggatccgcccggccatcttttctccgacgtcaaaccccgaaagaaaaacagccatcttcggagacaagactcagttcatatataacccaagtctcacttcgcacgtcctcggttctatcgtccgagtcaacaaatcatcgaattctcctcggaatctcggccaatccactcggcggtgatccccgaaatccccttaccctcgggaactcctccaatcccctttcacgcgaagaaaaactaccccgcggctcgccgcaatcggaaaactggcgtccagatcgcctacggagcgtttgagcctgatttccagacacctggaccagcgtctcccattgcctgacctcaatactcccttctcgaccgaaagaaattcactatttcccgacgacatcgaatataaacccattgatcgctccattcctcctgcccctctctcatcaactcccactatgtctattcaaacccctcacaacaccctcctgatcccaggacccatcgaattcgacgatgccgtcctccagtctatgtcccactatgcgtgagtcacaatatactatgctacaatatacaaccaactaactctcccagtgagagccacgtcgcccccggcttcgtcaaggtcttcggcgagaccctaactctcgtccgcaaggtcttccaatctaccaaccccgccgcgcagcccttcatcatcgccggaagcggcacactgggctgggatcttgtctccgccaacctgatcgagcgcggggagaacgccctcgttcttaacaccggatacttcggcgactccttcggccagtgcctcgagacatatggtgctaacgtcacccaccttaaggcacccatcggcgatcgctcttcgctcgaggaagtggagcaagctctcaaggagaagtcgtacaaggtcatcaccctcacacacgtcgacacctcaaccggcgtcctttctgacgttaagggcgtggcacaattggtgcgccgcgtcagcccagaaaccctcgtggtcgtggacggcgtgtgtagtgtcggctcggaggagatcgccttcgacgagtgggatctcgatgccgtccttacagcttcgcaaaaggccatcggctgcccacccggtctcagcatcgtcatgacatctggacgcgccatccaggccgcccagtcgcgcaagaccccgcccagttcttactacgcctctatcgccaactggctccctatcatgaagaactacgagaacaacaaggcctcttacttcgctaccccacccacccagctcgtccacgccctccacaccaccctcacccagatcaccgttgatgtccccgcccgcttcgctatccacgccaaggtctcggataaggtcaaggctgctgttgccgagcttggtctgaagcaggtcgcttcccgccctgaatgccaggctcatggcatgactgccatttacttgcctgagggtctggttccggctgatgtcctgcctggactgcttaagcggggtgtcatctttgcagctggcctgcacaaggagattgctactaagtacatccggttcggccacatgggtgtcagtgtcactgatcccaagcgtggtgacattgacaatgccctgacggcgctcaaggaggctctaaccgaggccaagcaggctaagggtctgtaagggctgtactccggtagatcatgtaaataggatcactcagacttatctagagtaaaccttgtagatcacttttgggtaaaactactgcaatgaattattgattattgataatgtttgttatatctcagtttcagaaactaacttgcatagcatcatgatcctgtgattttatggaagctcatcatcgtatagaagcatcaatcttcctcttttacctaccatgatatttataattctacctacagccctgaattaacaagaagcaaaccttctaatctgcagctacccgccaatcctccacattctggaatcctccctattggcgagtctaaccaggcccaaggcactagccgaagaatgcaccagacttgtagggatggacatgaacaaccagtcacagttaggaatgtaatattgtgccaggaatcactcctcgcagtcttatattttcccttgtcagctcctacttagtatcagagaagccggaaatatgccaagaccccctgtaacacccctagacagcaatgcattgagcaaccctgtcttgaataaaaacggcggatcttcaatgtttcgcgtagcactatggtgtggatggttcctgcatcgctagccaaactagggctatactttcacatggaatctccttgtggttttcgatagggttatgcctgagatgaaggtgaaggtggtaggagtagaatgttatgtcttttatagaatgtagcagtagacttcattttatttgcatgtatcccctatatgtatcatccataaagtagcgaagcgttccaaccctgatcatatcttgatataaaatctatacaagatgcattacttgaaacccatcctcccatttattctagcagccgctactttcgcctcagcagccacaacgacagccacactagcagacaatgcgatgaatactacatgtgtatcagacaagtaagttgggtcgatctgcatacgcattccaaattgagcccagatactgactatctaaccaaatagcattctgcagcaatgcgtccaaccaatgcaatctaccttagcaaactgcgcaccggacgattggaattgccagtgtactagtagcacaaatatcctggagtaagtctcatctaacacctcgacaattcctaaaacttactctatacgccaccttcgcgcatcctaataacacattgacactaataccacctcagctgctatgataactgtcccaacgacacatcgagaaaggacgccgaatccatgcgccaacaaaactgcgctaatgctaaagcacatgtgccaacatcaatatcaacagctgcatctgctataagctctagtagagctgcggctacgaggagcactgacattgaggacgaaacggaaatttccgactctgaggccgagaatgagttcaaggaacatccgataaagcaatatagtgggttagaggctaattcgatcccccgtccagaacagggatctgcttctgttttgaggatgggtggttgcttgagttttctaggtcttgcactaagtatcattctttcgttctagtgttgtcttcaatattactgtgtgttccatatactataaataccgtcctaagcctactctcccatgcacatattgtactttatttttttcgctgacattttcttcaagtaacgcacgaactcagacccaaagaaaacgaaccagaaaccattgtaacaaactgcacagtagtaaaagaaaacaattgcccgtctcataacgcgctatgcatcatttccgaatggctgaacaacttcaatcccgtttcttgtatcttcgactgactctccggcaatccagcatagaatggtgacccagtcgtctaagttattttggataccgtccttaaagtccatgattcgcgacgaacgaatttgaagagccttggggttctgcttgccatgccagatctgaaggatacggacttgaaaatccgatactgaaaagactgtgatagggatgtatcggtggtcgttatatccatcttcgagtcggcgcttagcgatcaagccataggaaacagatacctcacccgagttaaggcgatcaataaggtgaggctgtgaatcaactatgaaggcgttgatatggggctgagacgctttcttcgcgtttgtccagcctgcgagcttccattgccattggggtgcatatacagagcccagattgttgctatatagtaaggatagttagataaaggtattatatagtataggaactcagcgacttactcttcatcaaggatataagccggcatattctcaccaaagaagttatccagagaatagtggaaggccttgaccacctggcacgcgttaagccaccgccggtattgatataactccgggatatccttgatattcaggccgtggatatcgaattcatcccaacgttgttaacgtatcacataataggcgaatggattcacaaagcgagggccatagtctaggggatcaccggaagataattctagttcagtggtagtgatatgcagattttccttgttgctgcgagagagaaggagagcgagggccttccgagtggcgttatggcaggttttaacgtaaacctgaccttcgtcccactgcgtcgtttggggctcatgctctgatgtgatgggcttcatactgtgtccgcctgtcggtcacgatagcgagtcaggcgttgaagtctgctaggttgtgctgtcggaaacaagagagtgagacagcttttatagctgatgtgataaggctagaacctgttgttggtcttcttacgtgccttgttgttgttgtgttggttgattggcgtcggttggcttgccaagctggattgaagaaaagcaactaagcccaattgagatttgacacggcagagccgccaaacggtgcttctaactagtagagttccttcgtcgctactataacctccttgagagttttaagataaccgtttttgcgaagtactattcgaaagtataggtataggtataggtatagctacgatccgggaatatttctagtaacaggtaataattactactacttaggaagagtagggcgtttcgctacaaaaaggctacacggtgaaaacgagatttctagatgtaccctttcacactgagtggaaacatctattcatatagcaataagaatgcaataatcatagtcgctgctgaacaaaagaaaaagcgaaagtaaaaataaagaaaagaaaaaagcaaatttgactcctccgtggcttgtcctccgggctgcagcatagcaataacttagaggttcttcatggcaagaattgcgtcacagacatcagctccaagcacagttccagcgtcagcgtcacgagtggaggtatcgccggagtcaaacgtcttgtcttgaacaagggattcggggagttccgatccggaaacacaacgggctagtgtaaccagcgtcgaccgattgaggtactcgccagccgagggccaaaaacgcgtggcttcaaccttccttgccacggcgtcactaactcctcggctctttgcatttaggtatgcaatgatgaagcagaagtacaaataccgttcgcgaggacggttatcggaaacgaacgtcaatggcttgttgtcaatgtcctattatatcattgatataatactcaactctagcttttgcaatactaacctttagtctcatataagatccatcaaagaaaccgatggtgtcctccttctttgattcgtccaagacaacacacctccattgagttggacttttcatcgggccgggcataggtacaatcgcgatggtacctcggtcgaaaagtagctcaatattttctgccagtgtgatgcctaatttgtatgagtcagtcatttcctttgccacaaagagaatattcttacgattgcggcggtcaccaagaactccattgctgactccgaataggtggcaaacatccttggatgtcatagatttgggtacaagatgagcagctttgatattattttggggaagtacagtgcccaacacatgacaccacccaaagccagggcgacaatgctcattgataccgtagtacgcgtagaccttcttcttgaacgcagattgatcatacttggaacctttctgttttgcacgtgcccccagcacacgggagattctagcgtcgcggtaagcatgctcgagcaggctttggtcaaccggtccttcaatcctctgacgtttcgctgaaacttgttcagcaatgtcttcgatgatcaatgggcgctgtgccttcaggacatgaatggttgataatgacgaacggaaggactctaagaaggtttgtatttcttgctgaaaggtgtcgtgggagatcttttctgtctttcttgcttcgttgaggccgtctcggacacatcgtatatactcaagttcactttccattgccgcgaatttcatgccaagaatatcggatattgtcaattcatctgacatctcagaaaggcgggatgctacacttacagacctttgcttgtaagtccgtagcgctaattgacgagagggcgccataagagacgatattctttcggggatcatgggggactcggcaggctttttcactgacggtattatgcggacaagaaaatgaagggctgatcaaactggaaagaagaggtaacaggctagtgaggtgttgggagaaatgcaatatcagtggataagctgaagaaaggtgacagactgatgaaagtgccaagctgaagtaaaagagcaactaagcctaattcgggtttgacatggcggagccgtagtcattaaagccgttactagagtagttgctcaaagcggtctctcgagcggttttcaagcggttgcttaagtagttgcttaggtagttgaagtagttgctaaagtaattgacataaagtggttgattaaacagttaataatgatcatgatatgataaaggggacttgattttattagcagtttgcataccaggaaatatgcctaattgtgaaggctgtactgaattacaaggataggggagaataagctagctagagggcagtcgcttcgctctgcaacgaggctgtcgagatccctagtatcttacagtcaaaattacaaaacacgtaaaatacagcccataccgttatcagcttcgataacagcttatacgatctccacgcaagcttcaacatccttccaaggttctatcgtctgcccagtacgaattgcctcccctcagtaatctcgctatggcgaaggaagtaattactaggacagcacgttcccagcctgataaaagccaagaccatcacaatgacagagagaatgacaacaaacaacatgaatcattccatccgcgccatatcaccctagagacattccacaacctgctatcccactacccatcaacggtagagcgagtgcacctcaacaagctgaggctgaagctgcagtcaaaggcagggaagggaccaaaacgaaaagcggggacgaaggttagcatagcgccgaccacaaagacggagctcgatccgtccgaggagaagcgtattatcgaagagagggagaagttcctccagcttgaccggtggcgctatgaagttctgccgaagattatcgcggagcgggcgagtgagggtggtcagaaagaaagcgcgccggagggagcgcacttgctcaaggaggagttaattgatatcatggaatggaagacgtgagtaacaatttgcggtattcatactacaggttctggctttgtctgacttatttctaggaaacatggtgtttcccgtcccatgctcatgggaatggtgaaaagcaaccaagtcgcaacgatcaccaagtctacatctacggcctttgccaccctcccagatgcagaccctgtaattgcgccgaatgatgcattccccaaagccagtttggacgctcttactgcgcctatccgtggcgtcggcccagctactgcatctttgattttgtctattgccacggtcttcggcgatgctaagaaacaagtgcccttttacagcgacgatgtgtatctttggctttgtctgacggatttcccagaaggtatacattgcaaagagcagaagccttctaaacacaagaagcccaatggggagttgattgtcaagtacaatatgaatgagtatcgagatctgtggaatgcctcacaggagctgcgagcacggcttaacaatggcgctggagaaagatctgtctcctttatcgatattgagagggctgcttatgtgctccgcaatatcgctgtctcggattactatgccaaccaagaacccgaggctggtctaaatattgtgaaagatattgattcggtgaataaccagctaccaaaggaatcaaagatagattctggcgagcttggcacgaggcgtagtaagaggataaagcaagaagctacgtgatgacagctgtatactattgaggattgtgcctttcatgctgttgccacttcttcccatactcctagctggagacaagatgaatatcaggagggatctcaagcaagaggaaatccaacacgcattatcccagatatgatgtctctgataaaatagccaaacggatacgatcgtctcacgccttctgtacactaagtcttttacggggtacaagcaccttcccttttcccaaccgccagtatctcttcattaaagcaacggcgggaggaacctataagaatgacaaatgaataaagagacatctgcactggacactcggaggatgttatatagtcgacatgacgcactgctgatcgacatacctatctctacctcggtcatcatgattcgtcattcatattccatagattggtatgatgaagcccaaattataatcctcgtgactctatattgatttacgaccagtagttcatcaatatcttcgatttaatctgcctaacttgctatactatagacaacctacgcgagactaccatgaactacctattccagacgtatatcgtatgcaaactatggctgctacacttcctaggcaacgacatagcaaaggaagcccggcaaagattctaatataatcttcatgatcaatatcaccttcatgacacaccacctgaagccgattcggaagtagaagagcccggcaataactagggtctacataactgaatacaggaatttagttgaccattttgtatagttattacacaggacctgactcaagaccgcttgctggttacagtattcactacggagtatagtctaagttcagaaccgcatctatgccaaaccagtcgcattttttctcagtctcattgctatgtacacagtcacggccgtcacgtcttgattaaaagcagatatgggatacaggagagacgcatgcatcacaagaaataaaagtggggtaggggtaagacagaagaaattcatcagatcatgcaatccatgcattacgggtcatcgtcaagatgaccggtttttccggtgaattgtgtttcgacatgacgcagaggggtagggagaaataagtaatggtggatggtggatagatagtcaggggacatgaagatacgtaatgtctcccgtagggagaagcgaagaagagaggagatgagagaggtcggaatggtaacggcactgtgtgaaaagtggcagtacagactggatcagggcgcgtgagatcatagcagggcattctaccccggtttttttcatgttttttcatagaacaaatagtgaaccccgtcattaccgcttggacggattaggcttgcgctcggcagcacacttggtcttggcattgtccgcggaagaattgagatagcccacatgctgatcgtcgttatcgctgaacggcacaatagatgagatcttcttagagcgactgcgcttcaagggctgggacaaaggtggcccggtttgcggcgcaggactcgcgagggaaggtcccggcttggcttcggcggcagccgatggggcagcggcgcgctcgtcgtcctcgacatggatgtggcggaactcctggtcctcctcatctgcttcggatgacgcaggactgtcggagtcggaagctgcctcgtaatcatcctcatcatcactgaccaagctgggggcctggttagcttcgatggcgttggggctcagagtttggtgatccatgtccgattcccgagactgcagagattgggatttgccagcgagcgagatgtccaggaaggactgtgggcgcgagggggtcgcatgctcgatgggcggggtgtgcgcgcggtcgagtgcctttcggctctctgactctccagcagtttgaccaacaggaatacgcatcagctggcgaccggtgcgagcaccaagggagggacggctggttcccgccgacactcctcgatagtcatccgtttccgagtcatcgtcgaaaagaccaccgagatctacaggctttcgggattcttccaccaacttgtccatgtttagaccagcaccacgtgatttcatgagagcggacagatgaggagttgcaggagaagccaaaaactgtgggtttggaggctgttggatgggctcggagcgtcggcgattggtcggttcagcagttgcgggaggagtggtaacagcagacgtggtagccgtagccggtttgcggggggtgacaaagtccttagcgggtgtacgaagagatttccagggggttgtagcaacgtgggtagagcggatgagaggatgcacgtagcccggaattgttggattggcagtgggctcagcagagccaccgacaacaatcccggcgtcgtccacctgaacagattgaccgcaagccatggcagcagcgtcgtggctggcaaagttgcggttgtgcgcgatgcggcagtgattaatgaatccctgagtgctggagaagttatcgcgccggcagtccagacagaccagcttgaccaggacaccatccgacttgcgccggatgagcatgggtcccgacttctccttgaccacagggtaaccagccgacagtgcggtatgcttggtggcagttgagcctcgctggggacgggtctttccggccagcatgcccatctcaccgggattcccgcgcgtcgaccgaccctcaaccagcgaattggctcgcatcccagagccgacttcaccaccgtcaaagcgagggtcgggaagcaaccaccgggcgtagtggcgggcgtagggaccttcggttactccccatggagcaggcgacatcggcgcgggaccatttccaggtgccagcactgacgcgcccgttcccgagctcacatctggcgagacaccggcaacatgggatccgggatacgggatttcgccacagcgtcgcagctgttccagagcgacttggcacttggcgatctcctggtcaataagacgaagctcgttgtgcttgagtaacacctccaagctcagctgggcggtgatggtttcccgaagtcgggtcacactaggtctggcgacgacggcgtcctgcgccggcggacgcgcggatgcgaccggtgagtctgacgatggggttggagtagaaggggtcggagtgatcgagtcagcgatcacggtcggagttgggcgcgtagaaatggagtcggcgcagactttcgtcctagcgggcgcatcgggcgcatcggtcgcgtcggactcggagtctgaacgtttgcgtttgagctggggcagcgacagagcgttgataccacagtttggcagcattttgacatcatccatcaccttattccctcctatagtagagggccagggaagcaagcgaaacatgccatgtgactgcatagagatggttttggattaggtggcagatggtccatgcgttccaagtttattacgggaaaggaatggacgtcgattgcgcgaccggatgttgattacggaaggcagaaaaaaaaatctattaataagagggaggagagtacaataaagagaagggggggggagaatgagaatgggagaaagaatagtggacagaggaacaattggaaaggaaagggaaaggggaagaaagggggattgcgagagagacagaataagagagaataatgggaatgggaatgggggagaggtgcctgagaggagaacggggtggagtggatgatgcgatacttgttgttcccatacaaattgtatggtcgggccatgtaccattggataatcccattggatcagtctcaaatatctgcgacacgtcatacactatttacctgaattatttatttatttacggagtacaatacggggtatacggagtatctattctattatgaatgattcaaggcattcatgtcgtcctattcacctactacctattcacagttactgtattcatccataacccataaccttttcacattcggactatgctggtacccaatataaagcactctgaccgatcctcttgcatgccaagcctataacgggtctgggccttgccctattcctgcctaagctagctgtatctacgatctggaagatccctagcaaatcagatcctacatctataaatttggccgggggcgaaccggctataaacaggttctgactgcgcctcaattgcatgtgcgaaacacaaaagtacaactcatattgcataggtcagatgtggctgagaaagcaaatggaaagtggtggaagattgtcgaaccgaagggaacaagggagaataggggcaattctagggaactctatatacaaccatcggagccattattctacgagatatattgcccctatttatagcgtcatttgctgacatccggggtatactctagccattttaaggcatatcaagatcggactcttatcaagatattccacgatcatagtacataaccctaactcgtatccgtatctcttcctgacttttaatctgcatccactcatacctttcgctcatttactgtacggagtatactttccgtcaccatcctgactatcgtagaaatgtacttggtcaaccttgcataatatatatatcgtattggttcctagcacagacaacagtacgatccctctctctaacatttccgagataactcgctgcagagtataatatatacttcatatactaagcacattcgaatctccaatatttcattcatgcactccgcattatgtggatgcgatcaacttcagaccccgaattctaatcctagcctgcagatcacttggacttatgtaccggtttgaaactcggctgttcgtgttgtaatctatcgacgttaatttacggaccacctagatactattcaagatatgtatacagataaggcatgtgaaaatcatatttaacgttgcaatcaaaatagtagcccctgcttttgcggaccatacagcgaatctgttatcgtcaattgtctactcctcgagtcactccaacacactcccagcattaacaccccttagcgccttgcacaaacaaccaacaacagccttatcgatccctaactacggtataaacctagttggctagctcgaatgctggttaggtttattctcgagcggggactttcacgggattagtattactttcagtgtgcaaatgctgggcgaatttgtgctgatgcgagggatggaaggggatgggaggttcctatgtttgttgatgagtggtctcgagaggctggtaataactatcaatgttcttgcgctccgtggtattacattctgggcacaaagttctccagtgataacaggtttactgccaaaggttaatctgaatcattgtgaaactttgctgagcgtatctagggatagacaatttctcgtgagattgacagtgtgtacatatagaatgccacgatatattcaattctagttcaatcgttcattctttttcgcttgttagacaagcacaatccccaaacgccagtgcaataaaagaagatagacgctcgactcgagcatatggacgcgaaaggcattctggcctcataagcgtaaagcaggccaacacacgccaagtgaatacataaaacagatatggttgtcgaaataaacagtgaacgaacaataatgggccaacgtgatcaatggtatagcattcagatggcgagacggagaaatcaaatctccaatccaacatcgccatccccacaagaaaagcaatagtatccactatccaggctgggcctagttcatctccccatccttaatccgcaagatgaagttaacaacgatagcggcgagcagggcaatggcgaggattgtgggaccgaatcgatcatcgataccgctctgcccgcgccgacggatactctgcgcacgccagtggaatgtcacgagggcgtagatcattgcgcccatggcgatgacggtgaagagagctgcggagatgcgaccgatgcgatcgccgaagttgagcagaccgacggctaggccgcccaggatgacggtgaagttcagccatgagaggaaggtacgctcgtttgcgaagaagactttgggctcaactcgggttgggagggcgatccgcttgcctggtgggtgttagctgggttcgggtggagattggagggttgaaaggtggttgtggtgtgggttaggatggtgcaattgttctgcttctcttgagtgtggaggttatcgtggtgtgagtcggcctccacagcccaagagaagcaaaacaattgtgcgccaggaagaatggcggtgacgggagtgtgtctaggtggaattgtctctcatgcggagctgctgagctgctgagattggaggtgttgtcggacttacccggagcggtttggaggagaggttggctagacattgtcggatgtgaagaggggaggttgttgggagaggtcggaagaagagaattattggaagaaaaatccaaactcagtcaggtacagagactggcgaaggaaaaagcaagttaaaagaagcgagaggcttcaaaagtcaagatctcgccccccccaatgttctgttccgtcctgggactagcgcatacagctctgttgcacgtgttcccacgatttgatgagaggatcaggtgactaagtatacgaaatagcgtgggtttttagttttgatcttggatattattacagaatacctgtatcattcatatatcaattggtcagatctctattaacagaaagtgcctgaattcgacacaatatatgctcttcattgatatttacaacgttggattccggaggcccgagtttcaaccctctttgccttactctcatacggcgaaggtgaatggtcaatgcaaaaataggcacggcatcaagctttagacttcatcttgatattatccgaatatcccccgaattagtagagctgacaggtaaaatgtacaaaattcagcccaacattgcatgcatctataccatatgcctgtatcgggtatcttgaaataatatccttcccgatatcgccccaattaaaatgggtcgagacctaattcaaggtctagaatatatagatccacttagtctaatatagccgctatgctggcattaattgggtgaatggtagtctaaattcgaagagatggagtgatcaaaagagattatcctcccgcatagctgttacaaagctgtgaggttatgagaagagttcaaagataatgcaatttccatgtttgggactaagtaatttagtgtgctatagttagggtttggagggataccatcaagtgaaacgaaccctacgtcatagtctccttcctagcccaatcctcgagaatcaaatccgccgccttctccgcaacagcatacacagtgctaacaatattccccgaaacattattcgcgaacacggacgcatccgcaacacgaagtccctccacgcccttcaccctcaatctgctgtccaacgcatcacccatagcaacggacccgttgatgtggtactcgcctaaaacgaggtcatgcactgcttctcgggccgtatccatgtcctgcaagttcatactaaggtccggataagcgcgccgcaggaacgaggactccacgtgctttgattttgtgactttatcagcccagcgcagtaaggccgccaggagggagacgtctgctgggtggccgccgtatttggggtcgatgatagggggtttggttgggtctggaagcattagtatatgagatgattgggtactcaggggagtcgtgttctgtcactcacctgcactcccaatatggatagtccctctagatatggggtactgcagagaaaacgccatggtcaaaccagctggttgatcagccgaacgcggtgtaagcagcttgctctgatgatccatcgcatgcgggttcatggaggctggcacggtaagagccttcatattggcagagtggtcgctctcgaggtgtgcaatagtctgtgcaagttgtttcgcgtggaatgcgctggtcggtttgatatcgcgaatactctggatgatctctcccagctccgtctctgagagtattctctttgccgggaaaaagccctgcatggtgctgacagagctaagtggcccgccatttgcttcgacatactgcttactagcagcttccattgcctcgggcacttgatacaaggtatcccgtgtgactattccgggctggacatccattacagaaaacgtgagggggtggtctaggacgtttgcaccgacccctttgttagcgaccttgcactcgacgccggcggctttgagaatctctgggtcaccgatccccgatagctcaaggatctgggggctttgcaatgtcccaccgctgacgattacttcacgtcgcgtggagacctggtactcgactccatcgtgtgtgaagcttacgccggtagctttgttgccgtctagtacgacgcgattgacgagggccgagcagacgattttgaggtttggccgagcggtgcggatggcttcatagtatcctcgtgcggagtaactgcgcttgcctttattcgggccggttcgatcgactgcaccgagggtgtggtagaagccgatgtggtcaccactccatgcgtcagtgggcttgcttgatatgccggttacatcctcgcaggctttgatgatgtcgttctccaccggcaggattgaatcattgaagctggtgcgaatgggcccgctcgtgccgtggaactcgcctacaagtggcattgtggaccgatcggtgatggatgggtcgattggctcgagggtctgttcattttgttggtctttccattggaaagaattagattggaaagtctaaatgctgagatcgtacctgatgctttcgcatatactgctgcatatgcttcgcggaccatccatcatcccctaccagctccgcccagtcgtcgtagtcttgtgtcgatcctcgcacgtagatcatataattcatgccgctggatccaccgaggagctttccccgcggcatatgttgagacacgccacgattgccttcctataccccccaggaaatgaattagcgacctgaagcagaagtatgcaatgggagtacctacctgcggcaccgtatacatgcaccaatcatactcgggattctcgaacatctgcgggaaggccgcaggagtatcaactattggatctccaatgcgatacttgcccgcctcaatgacaccgacggttacatccgggttttcgctgaggcgcgctgcgagagcgagtcctgcagttccgccgccgcagatcacatagtcgaacgtggtgctggtgaactcctcgactgtgcaaattggattctcggccattgtatgattgttgatttagactggaagagtgtaattggggagacccacaagttaagtaagcacagaagggatagtaacctcaggtaggacgagctgcgggggttagtaaatacttaccgatagttatgccaatagagtttaaaacataccgaaagcggaaatatatggcatccatctacttcacgaaggttgtcccttggtcaagatcaccgccgctgacgttcatgttcgttggcggcaattctcagtctcaaaaagatagaaatcgtgtttttatatgaatgtaaatcgcttcaaaaaatgctatatgtacaatgtgttagtctcaagtgacccgactgacccggccatgatgtttggatgacgcagtcaccactccaatactcaaagctccatcttccgctgcacccaagcaagagctctctcccacctcgcatccacacaccttagagcatcaaacaactccgaaaccagcgctctacctgaatcccgcgcccaccatcgctgcccatcaagctccctcagcaacaccccccaatacataagaatcagcaacgaaaatggctgccgacaccggagactatcaacaaattctttctcaacagccgcaagccaagcgagaaccggcgccggatccgccgagcgcgcaaacttggcataacaatgcctcaaatgcgcaataactttcttattaataagatgctgccccgagtaaattccaatcataacttgatcattcaattccgatagatgtgtcagcgcagcttctgcatcggtgtcaagttcagcaggcgtgtttttccaaaattcgccctgcgagaataactctagcttaatccacgacttggtgacttgaatgatcttcttcacgccctgcagcagctcgaacagtatcacaatgttttctgtgatactggcgcactcgtctttcgtgacggttagtcggggtgacgcaatgctgatcgcgatcatgacgatcgagtgcgcgaataccgcgtcgcagttctgcggcgtgatattatcgatcgcgttgcggaatggagtcaaactacggttgtagtactgcagtcctgtctcgtagtacaggagtgctaattctggtggttcgcatgttgttgcgatgtgcattgaggctagcgccaagatcccgctcatcagatatccatgtttgaacgcgagtgttgggatggttatttgccagatttttatttccgagtcgctgatacagaggctttcgtacgtctctgttgcgaacttgtgcattagttctaggttgtcgattccgaatgagtttgtctgggctggtgccgggactggtattgctgtgggaacggctcgaccaggcaccgctgtgggcgagccgtggccatctagaggccgaggtacgtcggatgttgaactgggtggggtaagatgggctgtagcgcgacgggcagcggcgactttcaaatatgtgcattttaactcgcgggttgtgcaattcgagcatggtggaccctgctcgtcacatttgacccgcctgtttctgcattgatcgcacccgttgcgggattttgtgtgcgcgcgtagagggggcatgttcaaatttaattgacatggtgcggagaccaatcatgaagatgcctgtgaataaatgcgaggaggaaattatccgaggtagacatgttcccccgtatcatgtgactcgggttctacaccagttttggaagtttgtggcgggttggatatcgcctttcatatgatgtgtacggtattctcggtcacaatggccaaaatcggcagagcattatattatgggcatagtgtatatccttattggaataatcttggaatacatctgaaggctcagatgtcattgcacaagatactattattattagaactgaacataaaatcaacatcaacatccccgtccaaatgagttaggaagaatttcaagtgcaccgtactcaaataagacccacaacagcaaagataccaacaacaacaccagcaatgctaccggacattttctgggcagcaccagtgaaaataggagaagcagaagcagaagcagaagcggtagcggaagagctaccccaggagccactcatagacttcgaaggagtaggcatagtcttgccacccatacccatagcagccataccacttggggtacccattgcagtcttctttccaacctatcaatacaagcaacatcagccctgcaaacaagggacgaggaatgaccgaacaaaaaaagtcaaacgcagaaggtaatctaatttacctcgacgatagcaggaccagcaagaatattgtcatcagtggcctgcttgttgccctgagtgaggacgacatagctctgtccggcaacacccttgggaacagtgacggtgaactttccattacccatggacttgagaggagcccagactggaccggtgacggtgatgaaggcggcattcacgtcactagcactcgcgttgaagccgctaccagccatcaggtgcacttgcgagcctgtcatgacggcgttcatcgagctcatcatgagcgaggggaaggccttcacgggaagcgctccgttgctggagggacacgagacaatgaagggggaggcgacggtgtacacctcattgaagtcgagggggttgtcgaaggcctgggcgaaggggacttcaccgagcgcggcgcgcaggtatgcgctgtgtcgggcctcggtggtgaggatgctgccagcggctgtcaagtaggtgtcgctcatgatggaggctgcggctccgaggtaggcgctgactccgacgcctggggaggttattagtggtgattcttagtgtgattggatatattcttaccctcaagaacactggcaagggctaggaagctgttgacgtcggtggatgggaagttgtaggtgcagcgggcaacaggagaggcgccggcagctagaaaatgttagtatactggtctttctttcgcggtctaaatgacaggaacatacccttgagtgcggaggtcaagaaatcaacgtgctgcttctcatcggaagcaacctccttcaggttggcatagaaagggtccttcatgccggccttgatgaagtccttctgggtgtagttcttgagaccctcctcgtagaaagtggcctcgagatgctcaagggtaagcgcatagttgagcacgtcggctaaagaagaagcacattagacaagtcatgcattggttgggaagtgacataccgtcgctaatagcacgcgtcgagacagggccggcgttggcaagacccatagcggcaccggtgagggcaagattggtgaacttcattctgtagaatagtagagcttcggttatatcttggattgggagtctggatctaaatgaaggatgataaatctatttccaagtagagggacatgtcttttatagctgccctgccggtaatttgggggtccgatgaatggacgcctgctttgagctcgggcattagaattgcctggctgagcagaaactagtcattcttttccttgttttgtggctcatattgctgacatcccaggcgcaagactgagatcggcggtaggggtttcagatcgagacagaaagggttaacggaagactcggatgggatgtcaacaataactccgacagtaactagaggaagacccatgctccacgcgatatcatctgcaggaaccactgtggatcaagccggggcagcttgtagggaagttttcccaggtcgatcatgctcaaagcggaatataatgccatagctttgcatggtggagaactttactgagttctggggctttcagctgcaggaaccctggcggggtcagaagcgagagcgagagcgaaattgaatacgcaacgagagagcacattaatagtagcaccgagagcgaaagcgggaacgagaccgagattgaagcgggagcgagaccgaaactatgtgtactgctctaacaggttttattcctaacttttgagatatccctttttcttttggagttgaacgggaataggtgacttcccatacgacctttgtcaccggcgacataatactttattaatctgatatattcagcgtgagattatagtagggattttacatgtaagaatacctcctctaagtgagtaggtagcgtatatagtacatccacctataacgcttaatagatactatgtacctactacaagctattatgaggacctagttaagcctactgtcttaattatgggactttgccgttgcggcatatgcttagacttcaattcactcgttcgttcgcccagtattcttatcaaccgttattcaccttttcagacgtctgacttggtgatctgccattaacggccttctccccatctgcaggggggagtggcgtctggtctatcgacgcaaaattggaccgcgctcggatattcgccccgtatttatagaaaacaaaaggtatgagcatcaacagcaccgccaatgctccgatgagcgatccagccccacccacaccgagcgcgtcgaacatgtactgcgtgaatagtggggatgccgcggcacagacggaccgcaggacggtatttgctgcgacggcggatgcggcatacatcaggtacgagtcgatgatatagttaatggagacgacaaagatgaggaggattgacgttgcgaggaaagttcctgccacagttggcacggcccagtgaactgagttgtattccgccgtccaagcgaaccaaaatatcgtcactgcgaacataaccccgccaaccatggcgccgggaaggcgatcttctggaactgatttgtagcttttggtgagcttcctttggtatatttggctgttgataaacatcgccaggccgccgagacacgctccgatgactgtgccgatcaatggcagctcgccgacgccggtgttccaaccgcgcttttgctggaagacaatagggtagatgctaaacagcatatacaacagattatagacaacggcaaagtaaatggcgacggagaagctgatcgggtcaatgagaagtctccaaggcctcgtcaaggctactgtgaaaatgcctcccagggaacgatctaatgtctcgactggagccttgacgttctccttgccgggtatcttccggaggcgacgagccttgttgcgcagagccatcattggaagggtctccagtagagtgatgagcaggagctcggtggcacctgccatttagagtaggacatagaaggtccaacgccatgtctccttcagttgaatgaatccactgactactggctcaagagcaggtcctacaaatgtcatcgtcgcaaataggatcatggcgttgccacgcacgacgggtccccatatgtccgcgaggatcccgggtgcattcgttagggcggcactgacggctgtgccagtcaggaaacggccgaccaagagcccggcaaaattaggcgtagaagcccagagaaacccaaaggcaaaggcaaagtaaatggtgaatgagatgtagaagatccagcgacggccgtagaactcggataaaggcgcccaaaatagcggaccggcgcagtagccaaggaggaagagggttgtaacgagtccagcagcctcggtagagacatggaggtcattgctaataccccgaaaagctccggatggtgcagaggaggagaaagtggcattcataacgagggagatagcgacggtggtgatatagcacttccgtacgaacgggtagttttttgggttttcagggtcatttggtgaaaaatcgaggtggccatccttgtcaaagaatagttcctcgtccgaccctaccatgggtcctgaggtagacattaggaagttgtgcctgataaaattcattgctcgtactggtgaaagagcgtgacagtccgtcttgacataaactataaagcagcccgctagaatcatttctaatcgaaagctttaattggatttccaatctatactataagccttccgggaaaacataatcactgtatctggtaattctgccttttcttccggtgctgatatggggcggatgcacgaatccggtaatttcttggcttagttccgggacactatatacagggctagacaaatcaacctcccattaccaatcttaattccgatgacaaattgacataatgtttatagaattcgtttatttcaccctctcatgccgtaagtacaaagttagctcatgtcatgacctctgtcgtctttcactcaactcttcaagctttaccaaagcatccatcaacatcatccagcctcgcaactatagcaatggcaactccaatcgtcacaatgagcttcagtgaagcagcccagaaaagccgcactatccgagctcttgaatcaaagacgacggtccccgacagcactattgtcgggctggccgaggccgccatgttgaccgtcccatcggcctttgataaccagtcggcccggctgacagttttgtttggagacgaccacagaaagctctggtccatcaccgccgatgcgctgctggcgaggattggcgagaagcgctggaatgagggcaccagggaccgcatcgtcaactttgccaacgcctacgggaccatcctgttctgggacgaccagtcgtgcgcggccgcgatgaaggagcacgctccggacatatacaaggacaagacagacgagtgggtgcagcagagcaatggtatacaccagtattacctgtggaccgcctttgatgccctcggactgggtgtcaacctgcagcactacaaccccatcatcgactccgaggcgcagaaggcgtggagcgtcccatcagactggaagctaaaggcacagatggtgtttggcgtccccaaagacggtagcacgctgggggagaaactacagaagcttcccttggagtagaggctgcaggtgtttggagcgaatgcgtgattgacacagaagtggaataatcggtcgcttatattctatacatactcaatgatatagcttgcaatctgaatatcgaattgatttataatgatattacagacgatatgattacgattctaccacaattctactacgatatttttttgatatatttttttgatgccttgttaggataatcagtcgcaacccgtagaatgagccgaaaggtacaattcccgcataacgagggcttgatatataatatctagatcgctagaagtgcttgtttagttacctctactaagttggaaaatccgtagatggccaaatctttgctgggaataaaaacccgactgttgccactcggtcatgtgaccgggccttccttagtgtagctcgcagactagcttaatcaatcatctcttaccatccacactagttgtaccaacttggtagcatgtcttgagatccacctcagcgggatcccctgagctagaaattttcttttctagtaaaatagtcatcggagaccctctgcaaagaggccagtcccccagattccccgacaaagccagccatcactggcaaaatcatcagtttcatcagagcggatggacaaacagctccacagagccatcctcctcgctgtacagctcgataactacatccagctcgaccaaccttgtgctgacgaatttgactctgacacgaagtcaaggatcagcttcctactgagtccccactttaaccgtcccacactacctaaagcagaagatccgtacccacctgactggtcgattcaccgaccaagcctccataaggcgactgtcgaatttattaggcttnnnnnnnnnnnnnnnnnnnnnnnnnnnnnnnnnnnnnnnnnnnnnnnnnnnnnnnnnnnnnnnnnnnnnnnnnnnnnnnnnnnnnnnnnnnnnnnnnnnnnaccatcccacactacccaaagcagaagatccgtacccacctgactggtcgattcaccgaccaagcctccataaggcgactgtcgaattcattaggctttcccctttcatctctccaccgatacagccaagccaagctgagccacccaggccactaggaaggaaagccacacgtatacgcagacagaaaagccgtacaccgactcccgaaggacctactacccagactctggaagaaaccacccagccatctgtagaaccaacagatctggaactggaggagttttctcggagtccgactggcgtccagcctgtcccacatgttacaagggagataaccggcactggcacaatcatccagcccgacccgcctattgctgttccgcaagacagcagtagcttgtcgtcaacaagtcaaagctacatcaaccctataaccccactgtcggacacgatacagcctcacgcaagacaacccaggagattcatccagagaacctgttcggtccaacgaccagcattgcaacgaacacaacccgaacaacaacgaacacaacccgaacaacaacgaacacaacccgaacaagtcgtaatcggaaataacaatatggctggaggcgaaggaaactcagcggcccccggaggcttcacgctggaacagagggaggttatggttcagatgatccaacaagcagttactcaatcacttccccaagcaatatccggcgccctatccaccattcctcttaggcaacctggaccccctggaccaccaggaccaccagggcctgacggtcagctagcgcaccccgacacaacgtggaaaatcgcggaaattggttgtttcgatccagacaacaaagccacaacagcaattcggtcagtgaaccacatcaaccattataccaacgtctactcttgggtggaccacatgcgagacatcgccaagctgaaatccgaagacgttgtccgctcgcatatgagctactccctgaagaacaaagccaccaactggtatgacgcagaattgaccagcctggagaaggaagccctacgtgtacttccccttgaggacggatggtacaaagagttgatcaaacggtggaagccacctctcgccgaagctttacggaaaatggatttcaccacgtacagctggacagatgtccgagctggaaaagagccaagggaatacgctcaagagatcgtgcggcacgcccgagctgcagggcgtactgatctttatgaacaactattgaagatacgagaaaacatcgagccgtcccttcgagctgttgtcatgaacccaaccacgtcaaccacgctggctgaattcctagaacacctagacgtcaaattcttggattggcaggaccaagtccagttgagagatcgacgcctacaaacccgtaggtcgcagcccccaccgaggaatccaaggacccagaacccaaggatccaagaaggcccccaggctccaggccgcccccaaaatacccagttctggacttcacaccgcttccaagctaacaacccgcagtctggtcttaatacatacaatcagcagcgcccacagaaccgtcagagttggcaagcccaaccaaggtggcagaaccagcaacgcgggaactggcagcaaacccaagctcgcgaccaaggaaacctagccagaccggaacagcgccagttgcccgctctacagcagggtcaacccggaactgaacaaagacaacttagaatctcagaccggccgtattatcaaaacgaggaagcaaatgcgaaccaagtccgaagacaaacctggaaccaacgaaggccaaccgcatacgtaactgacctcgaggaccaagctgaccaagaactcgatcaaggtgaatactgccaaggcgacggctacgatgactcggatgactttgaggcgtactacggggaaccgtacctcgacgagccatatcaagaaccgccacaccaggaacagcctgggaatgaagactcaggaccagctacggcacagctttgtcatcctcaattctctgtgacttgcttgaattgtgatgtcagttttgaatcgggaaataccctccacaaacaccttgacagctgcaagcccccggcagcagggaccactgaagaagtagcaccggctttcttcgcaaacggcaccttgccattgtacgaatccgaccgtgccaaaactcacgatcctggatacgcatttcgtacttggaggtacgcaacagctacaatagcgttgggttcccgcaatcagtgcatcacagcttgtctggactccggatgcgtcatgaccctcattgattccgacatagcgaagaaactggatatcccaatttccaagttgtctaagccaatctcagtcagtggcatcggatcacagcacacatcggaggagtggataaagcttgacatttacttcatgggaccagttgcgacagccaaactgacgatcgaagctcaccttgtacaagaccttaaagccagactcctcatcggcatggacgtcctaggacccgaagggatctctatgaacttcgatcaaaggacagcacgaattgcctcctgcaaagacatggaattcggtatcagtatccagtcaaagccaaacaaaatggagccaaaaccagtctattcagcagacaagatcacaatccctccccacactatggttaacgttccaatcagaataagatccaagctaccggaggggcgtgacttcatcttccaaccggacgagaaacaagggacaatgtacacccatatggtgaattccaacttcgtattcgtcccagtcaccaaccaaacatctgtcgcacgaaccatcccacgccgagttcggataggcacaattatggagaacgacgatcccacaggatatatggtgcacccagctgaagcagctttagcggccacaccagataaccaagcacaaccgaagagtaacctgaggcccaaaaacagcaaagaaaccacgctacctaatgggatcacggtatacggcgacgaagccacagcgaacgcactcaaggaagtgctcctcaagtacaatgtttggtcaaaccccgaggtcgtggacattccccccgacagatggatgaggatcccgatgctagagggctgggagaaaagggtaaagagaaagagagtctacccgactggagaagcagagaaggaattaatcgacaaagtattcaacaagctccaagccgaaggtaagctcaaatgggctaccgatcatactccgactggatacccggtatttgtcacatatcgggatgtgatcagagatggagtccgtacccgcgtcggacgcccagtggtcgacctgcgagacgcaaacaaggaagctgtgaaggacatgtaccccgtgcctactcaagatgacatattgatactttgctatggaaagctgtttattacagtctttgacgctgctgcttggttttaccaatggcgggtccatatggacgatgtgggaaagctcggcgtgatcacccacagaggtcacgaaatattcctggtgactatgatgggccattgcaattcagtggcctacgttcagcgggaattagatcatttgcttcggaagatccggaaattctgcagggcctacattgatgatctcgttgtagcctcggacagcttggccgaacatatctcccacctccacgagctcctcagcattctccaggaatacaacatccgcctggaaccgaagaaatcattcgtcggtttcccgagtgtcaacctactcggccaaagggtcgactcgctaggaatgacaacgatggaggagaagctgcgcgctgtgcttagcctggactttccccgtacgctgaaggagctggagacctacctgggcctagcaggatacttccgtaccaaaatatggagacacgcacagatcgtcaaagccatgcaggacaggaagacgaacctactcaaggcaggaccaacgaaaggaccacagaggagagccttctcgataagaacgctgttcgagaaccctacaggtgccgaaagggccagctttgacaatctccaggctgcaatgcgacacgctcttgttcatatgacagtgttttttgaccacacaagacagctttatgcggaaattgacagctcaaaggatgaaggacacagcgcaatgatcttccacgttaagaaagactgggtccatactgatatgaaaaagccacctccagcaaatgtggttgaaccgataatgttcctgagccgacaactgtcccaagccgagcggaattactggccaactgaactggaggtcgcgtgtctagtctgggtgctacagaagaccagacatctgcttctcgcaatcccagccagtctcccagcaatcgtgtataccgatcacagcgctacggtcaatatctcagtgaacacaaatctacggtccgcggcgacagaaaaccagaatctccgactagtaagagcagcccaattcatccagacgttcaacttgaaggtctatcacagatccggagcgacgaacaaggttgcggacgctctctcgagactccggagcaacatgccgacgaagcctaaggaggacacggatctggacaactttacgcaaggaattgacgctttcccagcgactccggtaactggcgcagtagcacaagaaagccccagaatacacagaagagtctttacggaactctcggacgaaataaaagagacaattctttcaggataccagaccgacacccgatggcatagagtcatccaaaccttgcgaggggaggaagcctcggcggaccctgtgccaaccaagctgccgtacaggttggactgcaacggattactgtacttgacgtataatgacggagctgaagcactctgcctcccaaagtcaatgacgaaagacatcttctcactgattcacgacaaccaagctcaccaaggctacgaccgctgctggcaacgattgaaagggatctgcttctacaagggggcaaagctattgagagaatacatcaagagatgccccatatgccttgagcacagaacaccgaggcacagaccgtacggtttgctccagccaatcctatcgccacccattccatatcatactttgactatggactttatcgtcgcgctgcctgctaccccagaaggatttgacgctttgttagcaatgaccgacaaattctcaaagcagaacggctttgttccaggaaaaacgacctgggaaggagccgactgggccgaagcagtagttaccttttggtggactgcagattggggcttcccggccgaaatcatatccgacagagacccgaaattcattcaaggtctatggaaaggcattttcatgctattgcgtgttgaattgttctataccacagcttaccacccccaagccgatggccaatcagagagaacgaaccaaaccatcgagataacgattcgacactggtgcgcacaacaagctctccaagccggcccggacgacgagaaaccgaccagcaattgggccaaagccctaccattcttacaagctacgcttaactcttccgctaatgcctccaccggctactcgccgcacaagctcatgtatggcgtggagctgaagcaaccactagacatgatgcggcaagccttcgcaaccagccaagattttacagctagactggacgccgaacacagcttggcctatgcggccatggcgatgaagaattactacgacaagtcccacattcggaagtggtacagcccaggcgattttgtctatctgcgactcggacacggatacgacatcaaggccaaccagggactgccgaggaaactggcccaacgattcgtgggcaaattcaaagtcttacaacgagttggatctctagcgtacaaactcgatctcccgagctcctggaagattcacccagtgattagcgttgagcacctagagccagacccacccggtgaagatctctgggaaagaactcccgagccagcccagttgccagaaataggaccccaagccgtacaggcagtcatcagtaagcggactcggaacgtcggacgcccaagagcagacggtactagagctcagagaaccgaatacctcgtcagattcgtgggccgtggagctgctgacgatcaatggatttcggcttcagagctgggctacgctagctggttcgaacaatacgaccagcggggcagtcgcaactaatcccaactcagaaaaccaatcacttttatatttaattgcattccttacactatcaaccaagcttatgcaacgagcaaacaactcttacagctctcactttaccttcacttgatcctcacccgcttactttccccgagaccatctatactcacccatccttctaaatcttccttttttctcattcctctttgtgcatccctctaagtcttcttccctttcttattcctctttatgcaactccttcatctgaacaacacgcactacaacatgcctgctaaacgcaaggttccatcggccaacgatgattcgccagtcggcaagagaacggcgccgaagccgggttcaagggcctacgctaaacagctattgaaccttatgaccgaaactgacatggcttgcaccgtcgcagatgaagaaaagtacgcccaagtgatggaatggtcgcagagagaaaccaacaagagactcgacgccgaaaccaactacgctgaacgtgcactatggacccctggcgaagaacccccgactgactttggcaaagtcctgaccgcagctgagatggcagaagcaccgctttgtatcgagaaccagatcgaccaaaacggtgaatgggttccgccaccacgcggtgtgaagctgagcgacgaaggtgtatatctggccgccaaaaatatgactgctgtggagcgcggacaaagattcccagtcgacttcgataagaacgggcatgtccgagccacacgcatcccagaagacccagcaccactcggttgggcccatggcttacctatgataatggtggcacgagggataatcccactcgttggacgagagcatgccacaaagctgggcaacctcaccctgaaaaccgacgccaatatcaaaaattccccagctttcacagtcggcccagtggtcgcatcgaaatcctttgtcgaaatgagcagatcgatccagcgccaatatgtcacccataagcccgaccgggagtacaaaatggagtacaacgtggataccgcagttgacatggtctccaacgaccaccaggacatggcaatcctcctaggtgactctcacactggcgctccaagccgtctggtacgcctagttgatttcgacgggtatcagatcgagcgcgcggacaagacaaagaacaataacgcttacgttgttccccgcactttcttcaagaagtacggtattcccgggtacgacgacgcaaaacacagactttacgaaaactgcaaagaccccttgccgaaacccgaaggcagccagtctatatcaagctcgtccacatcctcgcatacactcgttccggaacaacctgaagaagcaaagcctaccgaggagaccgatatcacattgattatcaagctcaacgccatcgaacaacttgactccgaaggggctcaggtagcgaaaaacatccaccagttaggccatcagaaacaggaatacatagcttggtacaccgacgacgcgacgacccagtacgaggaatacaaagactggataaatgggtacaataaagcccataccgctgagaaggaacgtgagatcttagccagggaacttgctgcccaggttcagtctgtcaaaatggatttctctggggaggttttgaaatctctgctcctccactacgtcccaaacctcgacaccctgacgcaggaggaagcacagcaggattgaccttgcactcggatttccttttacaccaattttaatatccatttttacaagagccctcggggcgagggcttcttcggaaggggcgcctgttgccacttggtcatgtgaccgggccttccttagtgtagctcgcagactagcttaatcaatcatctcttaccatccacactagttgtaccaacttggtagcatgtcttgagatccacctcagcgggatcccctgagctagaaattttcttttctagtaaaatagtcatcggagaccctctgcaaagaggccagtcccccagattccccgacaaagccagccatcacccaccgaccccacaatttgctgctgaaagggttcattggccgagatcgacggggttaacatccatggatgcacaaacggaccgaagctgtggcggacgggcgcttatcttaaagctaacacccatggcatacctgcagggccctctaacttaatatctcccaacttcctctatgtttcacagattctctgccgcacctgcaaaggcagacagccaaaatcaaggctcaagatcggctcggccagaaacaagactagcgacacaaactctaggcctagcctcgaacacacagtccgtcccctggctaagagaaaaaaggccgctagagcatgtgaccgctgccgcctacatcgcatcaagtgcgatgagcagaagctgtgtacacagtgcgtcggcattaaggcaaagtgcatcgtgtcctatgccacatcacgcttgtctcgggccaacaatgacggtgcgagatctgaatcgccggccgtactccctccaaggtcgtcatcaccctagcctacttatgctgcacgtcgcaacgatagggccagcacaagcagctccatcgccaacaccagcccaactgtccctccttctggcataaacatggaccaggagaattcattggcgacagaatttccggataacgccacaaaggaatttttcaatcttgctcatatccaaggcttctttcccaaggggcagagctctgaacttggaggttgtctcttcccccagctcccatgtcccagcgttccattgggggaacgccctttcgcttcgaatgtgcttctcaaaagctagcgtagctactatctccggcttttctgggaagtttgccacccgcttctgccgatcatgagcaagattgaattcgccgagcttgagaccctgccgccaccgaccatgtatgatgagtattcggtaactagcgccctggtcgattctatgatcgctctgggagtacagaatagccatgtcactggccttgctgggcgtatattgggtctccagcagtcatcctaccccgcagccctcccaccggaagctgcttggcccggttttgaatatttccaccgctcccgtcagtgtatgagggcaacacagatgagacattggaggccctgaaatgtcaagttctcatggtcctctacctcttgaaggggaacgctttccgtgacgcatacaacctgcttggcatcactgtccgcaaggcctacatttctaaactccattgaccgcaaccaagtaatctccccgagattgaaaggacttctcgcctgcagctgtggtggatgctcttttccctgaatctccagtgctcgctgcagctcgacatgcccccggctagccaaaagagcctcgccaaatgcccttttcctgacgaggacgctctggcccgctatgtttcctcgccacacgaggatggcttgaacgcttacatgtactcgacccatttagttaagttctccatgattgtagctgacattggcgtatgcgcctcaatcgcggacctcgtcgacgacgacggcaatagcccggccgctctcgaaaatcacgcccttaacctctcatctgctccccgaaatcttgaggtctggcgcgaccagctaccttcagagctactcctgagccggtatgggaacagctccggcaatagtgagatgctcgattttgatcgtaccttgactctgccaaacaggctgcaccggcaagcggtgctcttggagcttcattatcacaacgcgtatacgctgctccagcgccccttcacgcgtctacactacgcccacaccagcagcatgatcacctcacccaactcccggcagccgggcgttgagttgcacattgctagcgcactccaccacgcaagtattatcgtcgatactgtatccacggtctgctccatgtccgatattttctacggctggccagctctggaacgcggcgttgacaatcgtagcctacgtccccgctaactcgctcatctccgtggtgccgcgagcgcttgactccctcacgcgcgcccaggccgttttcgacctctttccctccacctccccgaccgccctctctgcgaagggcattgtccagtcactcctcgacagtctgcagaatatgaacgcacagggcgcatgcgcagtcgccaatgatgagccgataggataggacttattcgtgccatcgctcgaggatcagcaaatgtctaacaatctcttccctccgtttatgtccttcgtgccgcaaaccaaggcccccgacctaatgcagtttggtgactgttgatacttgcgcctgacccgggtatccaccacgccataacctcaagggctggaatctcctaattattggtcacaaccgctctcgtatacgcagatgaattcctgccatggtatgaagattctcaccgctaaggaacgtgacgctgggagaatatcgcattacgatagtactttggcgttgtctccttggtctatgaggaggggagggcggacgaggtaccgttgatgagaaccatcctcccgctgaaacattccgaggctctatagtttcatgttaagttgatcgtacacgacacagtttcagccacggtcgagcatactttgaaaacctagggattagcggaaagttctccttggggtacttccggtacttccggcacttccgggaaatctttcaagaaatttcctttctggttgccttgcagcttcgacttggggttgtcctttcgaggcgcataccatgatagagccggaattcactcaataataaggcttcctgtcaccggggccttttcttcagttgattcccctattaggccaaaatgagtctctttttgccgttctgatatcaaaaattctacttcgtatattctgtcagactggaatgggccctctaggccctaaataagaccttggtttttgtttatgggtcaacaacttagtggtaagatagggctgtatttttgccttctaccatgcagatggtcgtagtaccaaatatacccatactaattgtgaacctcataggggagatggtgtatcaaatacatggatttacacagaatcaacagggaattaaccggaagatcatacaaccagcttatattaagccgtggtaatatatcttctaggccaatcaacactgtcgataaccaaaatagtggagaactcccaaggagcaggttttaggagggttctgtcttcacgtgccacccgggaattcgagtctcggctttaccaattattttcaatgagttgctactttgtgactactagtcagttatgagccagcgactattatgacttctgcaggcgtaagcgcctctcatcggaccccggaagaagatctggagcgcgagcggatccgtgatttgtcgaggtttgtggcgtttggccagtatccttgtcccactgatcaccactgatcatttccataacagatattattgtacagtcagtcaagcgtttccagcacccgatgcaacgacttttgaggaggatgagacgcctgcgacattgacgggagatgaacagcccacaggttgcgagctagccaaggacattaccctcaacgcactcgctcagctcggtgtcctccgcttcaatgccaaccgctccttcgtgtccataatcgacggcgaaacccagcatatcatcgccgaagcgaccggctcagtgtcgctacgagataagaatcgccacaaaccaggagatggtatctatctcggagcgcggtcgctagacctgatctggggcgtttgtccccacaccgttcgcttgttcacaggccgcgcgacggacgaaatctatactgataatgtaaccgccaatcgaacgcgccatattattcgagatttcaccctggaggatcgcttcaaggatcgaccatatgttctacagtggccgcatatgcgcttctacgcagaggtgcctctattcagcgcttctggatacgttctcggctcctattgcattgtcgacaacaaaccacgggcagattttggagatgatcaggtcaatgacctccaggaagtggccgacgccattggactgcatctggagaatgtccgaatgagccgggcccatgttcggactgaaggattggtcaaaggcttgacagatttcgttaaataccatgcggactttgatcctaaagaggcctctaaccgtggccgtcttcagtctggtgttaatgcagcgaattccataccacatgaaattgccgtcaccggtccggtgcttgatgtgccattgggtcatgatgttcgatgtgtttctcccaagcccgaacgatcgctttcctcagccgtcacgggggaaggatctgtgtttttctcgcaggatcaacgctctacgaccgaactgtcatctctatactcggggttttccgatcgaccagtaatgctgagtcccggcgaagaaaagtcgatgggtgaagtattgaagtcagtagatgccggtgcagctccaggtgtcgatcaagagttctcgcagctatcattaacccagggcactcccatatacgaacgcattgcatctatatattcgcgtgcaagtacattgctccgggaatctatggacctggacggggttgcattcctcgatgcctgtccaactaattttgcgttgtgagtacatccatctttctattgcgtggtatcttataacatttcttcgccagtgtacccaaagagccagaagttagggagccgtcgatagctgcagatcccgggttcccggctgctccgctgcctatccctcttgggctagctcgggttgtgtcgcatgaattcgaccttccgtgcgatactttgagttgtgcactaaagttgccatctaaaggcaatcctggcccaaataatcaaccacgaataccacagggattgctccatcaaatgctcaagtctttcccccaaggtcagatcctaagtttagatgagcctattgacgaggatgattgtttctcgaatgattacactagcgactttgattctcggcctgatcccaacactcaaacctgtgcaaaacaccttgcacggtgcctccccggtgctaaatcggccctgttccttcctttgtgggattggaataaatgtcgttggctttctggggtgctggtatggactacaagtagttatcgagctcttgggctggaggagttacactatttcaaggtttttggtgattctttggtttctgaagtttctcgaattcattgggcaactaccgaaagatcaaaattcgatttcatatcctctgtcagccacgaactgcggtcgccactgcacggaatactggcgagtgctgaattattacatgccagttctcttagctcatcgcaagaagagatggtgaccatgatcgaaaaatctgggatgacgttgttagatacaacgaatcatatgtgagtccacccgagtagacattggatatagaaaatgtactaatacgccctaggttggaattctgcaaggttaacaatttgagccatacggacaggatgaatgaaatgatcccagaaaatgacacggccaatcttatttccgattttaacattagccatttggtggaagaggttgcagacatattgtacaccggtcagcgagcacctgagcaggtgagccagctcgctaaaaggatgtcgtccaacaaggaagcatgcgattcgatcagcaaggattctagggcacaaaaccaactctctgttgtcgtacgagttgaccaaacggacacctggatgattcgctcccttgcaggtgcctggaggagaattgtgatgaatcttctcggcaatgctatgaagtggaccacagccggcttcatcgaaatagcgttatccaaagtcagagaccgatcggactcccaatcaccgcttgtgcatctctctattactgataccggctgtggaatcgcgcccgatttcatcaaacacaaactgttcgccccattctcccaagaagacccgctgtccgagggcgtcgggctgggtcttagcatggtacagcaattggtgatgtcgctcggggggcatgtcaatgtaaggagcgagataggccttgggactcaggccgatgtctacatcccggttcaatatctacctgctagtattgctccggaggatagcctgacaccgacaaccactcagccaggaactaccccaatgcatgcatgcttggtaggcttcaatggttatcctgacctcacagaggctcccactggaattctcaccgtcgaaagcaaacgaaatctttccattcagagtgcacttgcaaatatcttcatgacaaagatgaagtggagaatttcgctggctgactccatcgacaaagctcgtggccaggtcattgtcattgaggaggaactcctcagacgaactatggatgaaaatggtcaacttgtgtcagaaatggcagctcaaaatggctttgacttcttcatcgtgctgagcggcaatgtcccaatcatactcgacagtctctctgtcaacatcatccgcgttgcccaaccgtacgttacaatttctttacaatttttgatatgaaaactcatctcttttgcagattcggaccacagaaaatttacaaagccgttgaaaaaattatgaagtggcgcgaaatccaaacaaaagcctcgtcccctgcgcccgaagctgctttccaggtcatgtctccaccaatacaaagaaaaatcagttcagactccgactctgacgtctgtggtagagggacgtccgagtactcgaatgaagcaatgagctcaccgggaggatcaagcagctccacaccccgaccatccagcaagcaagcactggctcatgtgctcattgtggacgacaatgaaattaatgtcaaggtactgtcccacgtcgcttccgaggtctgagcaccgctaacacaaactagatcatgtccaccttcatgcgcaaaatcaactgcagctatgacacagcccacaacggcctcgtcgcattggagaaatacaaatcctcgaactttcactatgacttcgtcctgatggacatttcaatgccggtgatggacggcctcgtctcaacgagcaaaattcgcgaattcgaacgcgaacataatatcagaccctcttgcatcatggctgtcactggagtttcctccactggcttccagcaccaggctactacggctggtatcgataactacctcatcaaacccctctcccttcgcgccctcagaactcttatgaacgtttcatgataccatctatttgaatttagaatggctgatctttggccctcattgcacagcgtggtgttggtgggtttttcttcggtcttccgtgtgtatagaaatgaacacgctatagaaattgcgtcctgccttggttccagtacgtattttgatgtgagtttctcaacttgtacaaagataagtaggttcgatgaatgtgagacacgccaaggatccccgatccccatgtctcacaagtacgatgacccctgtacttgtcgagagcgaaccatatgccgcggatatctctgctccgtctcggccttgccaatatttaccccgcgcctctcgttgatcatgtacaacgcatgtcatattttgtacatcaagaaaagctcaaatgaaccacatacctactggttcagtaacgaatgcacagtggaaatattcacccaaatatcacaaaattgtctcatttctcatttagtctgttaggatttgttaattgtatggttaaaaaataacgagccgcgtgagagtcgagtgcgtccggggcctatcgcattgttgcattggggttggggtgttgaaatcccatctttatgtcgcgttggaggtgttgaagagccatcaattcgggctgcaagggctgtgagtcgctcgggctttgcgtcatggttggcatgggtctcgttcagtcgcgatcgatcttctctagaatgagcaacactgccttgtcgccgtgtccctttacatagtctataagttcctcagtaactatcttcaccaggccctccgccaccaacttctcaacctcggcttggaaccctccagacacccagatctcttgcaaaatcgtcgagacaacgacacccttattcttcgcgacccggacgagctctctcagagcaggatctggcccaacatgaccaagagtgaaagttcccacacacgacacgagatcgtatgttccatccgccttgtcaatcgggcggttcatgtccgcgactgtgagatctcgatagatgccagtctttcttgcgacagaaagcatggcgggagacagatcaatgccatcaattgccttggcctgggccattgaaagagccactccgaccagcccggtcccgcaaccggcgtccaatatcacgctgtttgtggcgccgtttgagagcccgtgtttgacggcggcttgagcgacaagcacgggagcaacgtagtcctgagcactgtctccaacttcatcgtcatacgaggctgcccatttctcgtatagagccatgcaatcttcggtgctgctgctggcgcgggcttgactgaggtatagttcgctggctgagcttgaggccttggcctggattggagttggggccaacatcgtggatgattgagattggtgccgtagaaggggctttgttaaatggtttaggagattgaaatattgcgtgtgtggttgcgaagggatcttggtatttctgccctaagagattagaactgaatgagttgtagtccattcccaagcctttgcggtattcttatagtcattggacagcacttggacatattctagaagttatggcgtgatgcggggttattgatgaatggacctgaaaagagtgaagtttggtcgatcgatgatgtcggtggaacataggttcgagcgtgctgagcctgggcctgggcctaggcatgatgcatgttcctacgctgagtatctacgcggttgccgaggtaatgaatgctcatttttctaattcaattatccgcagatggaagatatgaaaagcagtaatcattgctgttgatctgaggctctgccttgagtcgtaggcaagactagataatattttgtcggacctttcttcctctctgaaacacaattatccaccagtcatacatgtcatagggatttgtacttggccaatcatccgatctgatctggacatgtaacctgttctcttgttctcatccatatcccccataaattaagattagattgacgtggagggccccaccggggttaccattatagcgtcgatctatttcctagagtggcttggctccatcttagcctcaatttattccgaggtcgagtaatatggggtagctgtggagtgaccaacctcgttttcttaccagtgctccttgcgtgcacccatgcatcattgcctagtgatgattgggtattaacttttcggaggcttctaggccaacattacagttcaatccaatagcaaataatgctagatgccaagtgagagtgagaataattttgccgcggtagccagatacactgaaggtcagtgataataccactctgtcggactctgtagatcctgtttgtgtttgcagatcacgtgcatacggtatttttcattttcgacattgagttttaagcctccgtggcaccttccgtttcgggaaccgaggtttcccttcatcttccaacgaaagtctagatggagtaggaggtattattgactatataccaagatttatgtgaatactcacacaacagagcagctgacttgacattgaacagaggtaggaactactccgatcgaggacgaatccatgcctgtttcgcagaagggcctcacgaatcgtcttttgaggccactcaacagggttgagcccgggtacctttcatgaaatcttgaggaatcttcacgatacatggcttcctattgaggctcagcagtgcatctatgggacattgcccttccgagaaggaaatgtgctggatcttttacatagttggatctgtcagcatttggaggtattcatggtggcttgactgtcctgtcattgtcatcatctctaatgtctactttagggggttgtaagaccactttctcaagtctttttcgatgccgtcggaaacagatcgataacgagaatctaacggacccgaatgattggaaccacgctttcgctggtgaaacaaaatattccgagaagaccctccgattaatcggattctaccttcacgaaacgaatatatgaagagtttggaaatacctcgaggctccccaattcttggtcatcttcggtcgccactattgccgtttcatatctcttccagttacaagtcgaaaataaagatggaacgacaacattcgatattatttcccttgtgtacacaatcttcgagattgccgcaggtcattccaccaaatctcggcgtaagcatgatgcccatgttcaaacccgctacggccccttttctatcaagccatcttggaaatggaacacacaactatggccacacatctcgttatgggagcaccgccgagcacgggcaaaaagaaccgcatctttgaatcagaggactgtcgatcaggtttgagttgtacctaaggcccaataatctacacaccaggagacagtacaattccccgacaatttctccctcgggcagattaggaaaatcctagctggcgctccttaccgagcaaagttatgctttcggctgcttttgttccctaagagaagtgaacagttgcggtgtttctttaacaagaagttggaaaacagagacgcgtcactttatgtacctcaataatattgcatgcaacttgtcatatatcgtaatatgaagtaatcaataaagaccttaaatcaaagattctctgtccgctccacagaaattgtttcccgtccaatcaaccacgagttcgtgactgccactcatggtcatctatcaaatacatagcactagtacggagttcgtatcacatgcaaccaaattgcgatcttgtctcctgtgcacgggccataaatggtaatattaccagaataggaacattgtggtacgctatgatacgctggaaattacgagatctttgaactacgaggtcttcgttattttcccacaatctttctccgccatcatatgtccaccttttgtttactctatctactttttgataaacacacctcatatgacagtgacgatgggcaagatgagggacaactcattccactacttcatgcggctgcctctggaactgcgtcgcattatctggatgcactgtctaccgtatcgtattgcagaagaagacatccctgaatgccttttcaacggctgcgaatccaaccaagcctgcgacacccgcaagacgatgaaacaaaacgcccagcagccgaccatcacattcgttaatagcgagtcttggctggtcgcactagaacagggacaaatattgaaatctgttgagatcaatactctggagtcaatatgggtacagccgcatcgagatgtactgcatcttaactggatacgactatactacactatctggggagttgatcacgatgctccgggtagggctgacgagttcctattgcatgcgaaggatcttgggatgcgtccttctgtcatggcggaacttattcacccttttaacttgaaggcggtgttagatggcggtgatggttctgatccgcccggtgacctgtcgccttttcatatcggcgtatctgtcatgccggtgcttccttatcactgcatagaaggtgatgatatgcgcgagatggtcgatgttctaccttgggcgaaaggccaaagaagcatgctagacatagccatggcgggggtttctctacatatcaccagggaagcagctctgagatctggcctgtttggattattgggtgatgcgcctgttcagatgattgatgttgacgacagggctcggttgagggagtttgaagcattattcagggaacacacattggaaaaggaaccagccgtgcaaaagctattcgatgcattcacaagctcgcgattccaaaaggccacggaaaaatggaaaaaaaagctgaatggtatatcctggcttacatgtggcagtcggcacgagacagagagctcggcattcttgggacgaacccgggttctgcttggctacctcacctgtcagaggagaagaatatcagcatgtctcagtatttacccgatgagaggcatccgtgggtgaagcaagctaggcaagtcgcccccaagctgcgactgcggatcatggtgcggtattgtaccaatgagtgttgcataaaggagctacgtcccgaattcttcgggtatccataagtagtacttatttggtaaagagatatttcgagtaccaattcaacagatagaagaatatgagcggctttaaaaagattctctcctttggcggatgggcgttccacagagtcgggcacgttccagcgcttcagagatgccactaagccagagaatcgcgggacatttgtcaataacctggtgagcttcgtgagctctcaaaatctcgatggtttcgattctgattgggagtgatctggtgcacctgatattccgaacatcactcccggaagtcctgaaggaaacaactcccttgctttcctgcagttgctctgaagctagctgcccagcggaaaatccatttccattgcgctcccgacttcttactgatacttgaagcagtatcctgtaaaggatgtggcaaaatacgtggattactttatttacatgatgatgtatgacttgcacggccaatggggtaagtaacacagacttgagataaaattggctagaacgacgtgctaggaattagagcggtcgggataagcgaatcgccgttccgcctcctgtggacacttggagactgtaacggtactcaaatgaccccaggaagattatagcaagtgaaataattatagaaactataggcctaggaaagccgcgctagatgtgtctaccgctttcaagtgaagaaacattcaatcgcaactgggtctgccagcgatacctgcctggtagagagggaatccatccgatgcaccgttttgctggaccaaacctagaacagacatggctaagttctccaggtgtttgctcatgtggaccactagcttcttccaattatcgaaggtatttccacaaaatcgacacgactcctgtgacgtttgtttgatctcttgacgacactgctcgactatctcccacagtcgatcgatatctaagtctcgttggacttcagaatgcctctctgaagtgagatcattggatttcttcaccttcggctcgagcatcttgtgctcacgaactagatgctggacaaaattgtctttgcgaaagcactttttgctgcagtcggagtacgagcagacccaccactctgactgccggtgcctttcggtctcgtggcgcacccagtccgctttccgtttgaatgatttatcctcagagcagtcggaaaatgtacatgtgaatggttgcaaatctgcttgaacatgtttcgaccagtgggatggtttcaaaaacttcttgacctgaaagcagatggggcactcgaactgagagggaaacagcgagacaggaggaatgggaactgcaggggggaattcagccacaggcgctgctgtttcgcccatatcagagagccgatcagaatttcgactaacgtccattccctggagcaagcctgaggggtccttaggaagctgcaatgaggattccccgcctcccagagcaaaacaatactcgcctgagcggcacgagcggttggtgacagcgtctatatggtttcgctggaaattaacaagaacattataccggcgaagctgctcactcgcaaagcgatggaccaaagcaggctccagccgtgggtacaaatgcagaatgtgctttttgaatccttccacggtagggtcgatcaatggtgagacagcaaggaagtccatcgcaagccctgggttttcaacaaggctgcggatatcgctatcattgtcttcagtcccttcagtatcattacccctggctgtatgctgcggtatttggcctgaatagggcccgggatttgcacactcgccaatatttgctttccccttaacaccaggaccaatcgccgtgttctccaaacccttgtgtagggtcgccaacagacgggaaaattcggctgatttagggagcgagaagattgtcaatcccgagttagtgtccacaatatatggatctgctcccgcttggagaagaagctctgccgtctcatagtttccccgccagcatgctgcgaacagaggtgtggatccatagcgtccacctggagcatcaacttctgcggaaaggacagatgcaagaatagctttgacgatcggaaccaagccgaatgaagctgcatagtacaacgggttcgttgtctcgatggctacagtaggtacttcagggataagtgcctgcacccatacgccaaaattacctcgacgaggaagatattgagaattaaagaatttgttgacgagttgatagtcgcgatcatcgaaactgcatgatccgccatgggtagcccagaactgggccgcatattctagaaatgggtgctcgtgctcgcgtgatgcgattgaatcgatggagcttgtatatccagacagaaaattatcgagacacaaataggtaaggctgagtcgcattatgatttgatcggcggtttcgtgattcaaactgaaatatcgcacgctagaggagcggatccactcggacgttaggaaatccttgatagatgcgtgagataacttcacatttctaaactcatcctgggtgatgagtccctgacaaatatcgagaaggatttgcggcgaaaccagccttaagtcgtcatccaaatatgtgcacgtcttctctagtatgactgcttcgctcaactcgggtagggtgagcgaacgttttgagaaactgagccaaaagagggcgttgcggctgagttcccagtcacttggtgggattcgctctaagatgtgtatatatgtctctcgtagagtttttggcaatgtttgcaatgcttctcgaattgacttggcggtccgaagtgagccgagggtttccaaagaaagctgggtccagcgaaatctgcaaaaatgggtcagatacgaagatagtattttagtgtgatactgacgatccatcagctccttccagaatagtcgtccaaatctgatcttggagacgcgtgctcagattcctgagcgtctcgtcttgctgcagtctgaagcgtatgaatacgtcgatatcgtctctgacaatttcagcattcatatgaattacattggcatgctgtccggggatcagattggccgttccagttatgagaattcgaaggtttggggccaaattcgagattttcagaagagaacgtattatgatctctttataaacactctcattaattgcatcaataagaagaatgactcgtttaccaccagagctaatcttgatgatggcatcttcaatggcaccaatgtcgattggacgtctgtatgcacttgactttgttgtcgctttgaagagcggccagatagactctaataccgagggaatcgattcagagagctggactaggagcgatcctagaatgttcaccggctcttgaaaggcagtgtcgtcaaatttacagtagaagtaggcaaagaccaatctatggtcatttgaagacatccgtaccagctcatcgacagtatgagcactatagaatgttagctcaataaccactcaagaacatggaggacttgcaaaagtgttgtctttccgattccagctatgaaaaggtgttagactatctcagtgtataatgggtcagggcgtacatttgcctaagaggacgaaaatgctccgatgagtgccatcattccatagccagtcattcaaaataccatcaatgaaccactttcctgtgtgatttgctcgcaaattcgaggcttgcagatggatactacttgggctgacaggagccaaccatcgggaaagctcttcgtgggctgtacggatcatttcatcatttcgtactttcagatcttgttccagagattttgcgaggcttgtgatttcactgtgcaaatctcgctggaggctattgctatcacttgtgataacaaggatcaaccaagattttaccctttctaggcgggtgaggtgcgtgttgagttgttcctgggtgaacggccattccagtttttgcttcactctcttgaatttgttcgctggctctttaatgtctgaaaggagaacttgaagagactcatttgttttttgaaggatgctcatcagaggttctggggtgataagagacagtggtcctaattttgtaggtcgtggaggctcaacttccgagtgaagatgttctagaattcctttgagagcgaaaagctcctcacttaatcttcgaatatcggagcttgcatcacgtacgccttttgcatatgctatgaggcgggggatgatgctgctaatgtcgatgatcagcgacgttatggaaatagggtcagccatggtttccaaaacaatgaaatgccatgcacatatttggaagtctttcgaaactgggaaatcaggcgggctgcccttgtcccacggagtgcgtagtgacgtcaaatcggttgagaataatcttgtaggagcgggttgaaaaaaaaactcgctggtggacttgggggcggcaaggtattaggggatgcacggatatcaaagcaagtggagacaaataagccaataacatctaataactaaggtgatgagcagagaagtgagcagatggagtccttcctcacatccctcagcagtctcccaccgcttcctgccaaagctctcctccatcaacatccagatacctccgtaatggcgccaagactacctctttcaaagctcggaaatattcagaatatgatatcgaacaaatcactgactgccgcgcaaatggtcaaagctgctgactgcagtaagcgtcttatcatcaacatcaagaacaactttcgccggttcgaaaatgtagaaagttcgagtcttgtcacgaagacaaaacataacacctccgacgaaagaagcactgtgcgatcgcctcctcgaaaagcctgggctatatttggatgatattgttacgatctagtgatcgcacttcgcatgtatttgtactatttgcattttcgctcgtagataagtggatgtgatgaacgaactgatttcagacggacaggctggtctccgttaggcgcggcaccatttcagatagctattattccatcgcgacaatcgtagcggtaccagatactactaagatggaattatgctctcttctatagcctgatggttggtggtttatattaatcaactcagtgagcggtcagtgtgaatgaatctcacagacacacgaattgtccaggggtcaattgtgttagctattgcaagtgtactggtgcacgatatccaggaaacagtttctagaggatgaactttgatttgctgatgaagcctgtaagattgccaagcctacctgttgaggtgccaacagccgtgcactgccccggggctcgtgctcgacatcttcgcccttttgtacatcagcccccctcttcgtcatcctccaaccatgagttccaatttatatcaattgtataggccgtgaaacgcaatgtctgggcttgaaatcgtcggggtcgttgccagcaccttccaactcgcagagattggaatcaaactctcggtcaagctttgttccttttaccgccagatcaaagatgcggataattccgcacagcgtcttgcaagtgatgtctcactcacttgcagtatcctatatcaattaggcaagatcttggaacaggacagccagacaaagctttgctcccagcaggcctttctgacggcccaggaagtcttggaggaatgcgagaaaatcttcagtcaaatagacgaagcaattcagaagaaagatccgagttctggtaaaagcaaatgggaacgtggcacacggaggcttacaattgtgatacttggtcccgatcttgacgtgttgaactcacacttggacaagttaaaatcgaccatgttgctgatgctgaatgtgattatgtatgcaagagaaattaaccggtatgtctcatctaaagtatctctcgagatccacgttgttaaactccattgggtaggacatccgatcattcttcgctcgaatgccaacgccagttgattgaaacgcttctccgggagaaagccgaaactgaagctaggttaaagagactcatcaatgtggccgatattcgttcagattgcgatggagtgggtagattgtcgtcttcaacactgggtgcgaaacctagcatgagagtgtggcagcgaccttcaaccggaaacgaaattgacaagtattatgaccttgtcaaaagtctactaaatcaaatcgatgcttgtcaaataaactttcaacaagatcgccatttgaggattagagatggagtggtgaatgttcacaaggccgaacttgccatatttcaacaatcccatggaaaggcagcggcacaggcttttgattgcccctatttcagaattagccaccgaggaagggacagttcttttaccccaaagccgaactccaacatcccctctcaaacggctgaggcgtcaacgaaacgatccaccttgatcacattgggaaattgccattcttttgggcgcagccccttgcctgctattcgtcgagcctccaccagtagtttggatcttgaggccgctcataaaatgtcaaggaatcaccccggttaccgtgaatacactaaacttgagcttaaagaacctatgggggaaatgttcatcaaccagtccagcccaagaattagaagaaactcagcatccgcagcagaccttcatgaaacttctgttggcttctcaatgtccgatctgcaccctgtggccagcttgggtcgagctcggtctccgggtcctttaccttcaacttccaatcaatgtgtggccccgcgcgagcagtttgatagagactaccctctcaacccgcgctatcctacagcgaagtattcgcttgatcggcctctcagcatgactgtgatggacgagcatccccacatgctgcgtaaagaaagacctaaccggcctcaagggcccccatcaacttctgtgggatttgacaatattcgcgtcagagcccgaccatccacatacgccaacaacggaggccacgaccttgctccaatagccttaccccacgagtctgacgatagttgcgatacgtaccccgacaggcaccgtcggcgtcgccgcatacatcgctgcgagagtgataggcacggcggtagtcgatccctggaacagaaagcacttgatgccagcagttcgaaactggtggcgacctcaggtaaggaaagtcccaagaagcgtgttgcgtgggatactttggaagatctgatgctttcctggacgacacttccccgggatatgattcggctatgagaggacgcacgaagcagatgttgaaacgcgtcaataatgccttattccgtattttgtgccacccaccctcgctacgcgaccgagtacggggtatgaacctcaaccagaataatatcttcacgtgaatgagtgcagaccatcttttgcttttggactcttggttatcatagcatgcaaggagttgggttgtagtagaagttatgaattagggcttgggtaggtggcgaaatatatatgccattactatctgctgagtgacagtgttggatatggaagcatcgtctcagcttcacaaattgatctgtacattcccacaatgggtttatttacatctcttttgttatacaaaacgtgccgtctggccataatcactcggccgatcctctaccgtaacggcaactccataattaaccattatattccgctcgtcgctcggatatgccagtttctcctgactgcttgacggactggtagaacggtatgcactcgccgactggtacgactcctcctttcccctgaagctattcaaaggaatatccgttcctctgaaagtacccgagtggtgcgatggtataccagtgcctctacggccccggaggttgtacgagtcatacgggtaggatgtcttggagggcgagatagcagctttcaggacgcgataaaggccggggcaacaaccgatcataacggctaggagaatggcagttagtaaaacgattgaatatgcaagtggaaaagcgggaaatataagcataccgattgatgcctcgatggttccccatagcgctagccatgatggagcggggactccattttcagtatcacctaactgaacgacgcggatggtggaaatgatgatacacacccagccaaaacagaatagcccgccaatgctcagcttttggcggcttttcatctgcagattccagatcaggcggattgggaggatcatgacttagcgtcgagttagctcagtttaaggaataaggagcatagcacgtacttgctaagtcagtggctatatccaccccgtatgcgtagtacaagctgataacggctgcccgatggtcgcgtggagtgttgcattggcctgcagtaaaccaggcatggaagctcgaacatgaaaaccacgatgagagaatgcagccaatgataaactgaaaacagtgtcgtcagtaatttgaacaccagcattcagacgaaaaatccataccaggacacaaaatcccataataacccaccaggcgataatgtacttctttccaaccaacaaccttttatacatcgccaagagcgagaacttgatcatccacaagcagagccataatgaagatgtcgtgacaaaaaagacagtctgtaatcggagtccatcttccgagatggtggcatagggtggaatcgttccggcaccgactgctgctaatcgaaagatgacaggagagatgtagatatagagaatgctcaattccaagaagaatatgtaagcgataatcagaaggtaatcttcacccttgaggtctttgtaactccgaatggcaccagcaaaacgagtgcctacaaccagcgaggtcagtacaatcaaggcaatgccggcacctttaatagtttcgggcccaaaagtgcccgtaatggcctctcccatcctttattgcgagactgaattttagaaaagtacgacagggaccgcgcgggcccctgtcacccatatacatcgagccatttcaccagaactttaacgaacgcatggcggccgatatcttgagtttgagattcacagatgggccacctacagccaccttgtgcaaacttcgaggggtgcatggcttagaatgaacagggattgtaaaacatgcacgaggggcaatatacgaatctctttcgaaggccattgttgaagatgcatgccccgccagccctgggccaatgatagaagaaatatatagtgccggtggggggagggcccgcgccctcagccacggcggttgtgcctcccgtggccattgggggagccgatgacgggccgaggcgcacatggaggggcctgggagagagaggaaagaaacagatctaactagacaggcccatggcgtgagtcagtatagccgtatccagagaaagattatccagttgatcttgaaaggaacaaaagacaggacagatctcggttaatgccagaaggctggggtgaaaattcgaattgagtttggacttctgaaactaagccctgcataagccccggagccctccggaatccgggcgatggtgttctgcgttggccgctcgcttagaaaattcatatcccctatcttttgagagtcacttgcgacttgaggaaaagaaagaaaagaaagagtttgtaacagataaatacaactttacgtaagaataagatggacgagcgaaacaatcgctgccggtgaatctagaagcaaacccacaagtccattgttatgagcttcaagctatgtagcttaacccttcgggctgcgccgcttcgcttagatctggaagcgagattattatatatacgcgttaacgaaagcgaatagcctagtcatactatacgccaattatacggccccgttgattagttacttaatgacacctaatgcatctccggaacctcatcggatcagagcgcaggggaagttaaaaaacaataagctccccccaccttagtttcttctccttttttctttccaagccattgaatttgtctatatatcacgttcgtttctgtttgggttacttgcatagcttttggatcatgcatatttcgacctttattggcgggctatccgcgatttgcggattgaccctagcccagacaactgtgaccagcccggtcatcgaagcggatgatttcagcgtcactggcgcattggaggatctcggtgtggatgtgtcgcaaattcctgcattggagtcattcaccgccattgagacacggtcaaccgataaggcctgtgcagctgctgtaagtaagctcgcaagccatcgagcaataatttattctaaatctctcttagtgcgcaagtttgggattcctttttggctccaaggttgctgctcaagatactactgggtacagcaacttcactagctcgttctggtcagtgcagcaagaagaggtccagcctcgttgtattttccgtcctaccaagaatacggaggtcagcactgcagttttactttcccggttgacaggctgtgagtttgctgctcgcagtggcggccatgcggcctttaccggggcttccagcgcgcctggcggaatcagcatctggttcaaggatatgaatgccgttaccctgaacgcagacaagacagtcgcctcaattgagcctggaaataactggctcactacctacactgccctcgagccttatggattggccgttattggaggtcgtgccgccagcattggtgttggtggctttgttttgggtggtggaatctcctatcactccaacctgtacggatgggcttgcgataatgtccacagctttgaggtaagaatatacatctgtcataccttttgccgaatgaattactaacaaatcctgtttaggtcgtgaccgctagtggtctgattgtaaccgcgagtgaaacttcccacgctgacctatattgggctctgcgcggcggtggaaacaactttggccttgtcaccaagtacaatatgtacaccatcccctcgccaaagctttacggtggtgccagaactttcctccagaccgagtttcccgaggttatcaatgcttggatcaacgtgatcaacaatgccaccattgacggcaaagcccagcaatacgtcgccttcctccggacccaagatatgaaccttgcctctgctgagttgacctacgtgcacaacgaccccaaccccgaaatctacaagcaatacagaagcattcccgccatttccgacacatctagtgccaagacccttgtcgagtacgtcgagtaccttgagagcgagaacccattcggtcttcgcgaggtgtactggcctatcagtgcggctctcgacgagaaatttgccaactgggtggtggatctcttctactcgatgatctctgaggtggccgatgtcgccggcgcccagcccgtgctcatctaccagggaatcaccgaggccatgttgaacaatatgaagaaccacggcggtaacgctcttggactcgccggctcatctggccctgttcaccttttgcacatttcttgctggtggacgaacgaggctgatgacgagactatctacgcgtttgtcaacaaattcatggagaaggtcattgctgaggctaagagcgtcggagtcttcaatgaatatgtttacatgaactacgccagcatgttccaggatgctgtcgctggatatggtgctactaacaaggctcagctgaagaatattgccaagaagtacgaccccagggaggtttaccaaaagctccagcctggttacttcaagcttgatggtcctcctgtgactccatctttctagatggacttgacgagaaaaatgtacatcatctaccgcgggatataactgtatgtagaatgcatcttgatgatagcatattatctatatcataatttaatatctgtgaattatatacatattgattatatcaggaggcttgaaggatgttgtagaaaaaagaagcggctcgggtagaaatccacggttccacaaatggaaaccctggttccatcccgacatatccatgggtcatggtcaatttgcatagttaatgatggggctgtacgacgtcgggatgggtcttgtttcccgggcggaaagtgtcgggcatacagaagggtttgaggaaagagtatgggggccagtcatcgggccgaggtggttgctgccgtggcgagaaaatcgagagaagatgcttgattctagcgatgcatctgacaaattcatggaggttgtaaagctctggcaagacgtccggcccaacgcccatatatagcctcgatatgatggcccgggattttggtatcgggattctgcgtattctccaaatttctaaagtgaggctgtacgtgatgatcatcgcccgggtgtcctctttcaggtggatcccaatcttagttagcccagtcaagatgctccaagatgttaggggacttaacaggtttacgagtcgacattccccaagtgcgataccagcccctggagcacctcgcttgtccatttggttacatgggaaccagatcggcgaccatgactcgaaagctaaacacacagcttgcacttgccctcacgcaacgactgcatctgcttgtgtcatctagctcacaccacaatttaaggttgtggcaccggtcgcaggcttgccgcgagcgctattcggacatcccactccgtgcttttggaaatattcaggagtggatgggctgagaaatgcgagaagccaacacaaactggggtctatgtagcttgcgctgaaaaatggctcgagttgatggctgtgtctgacggtgtgaggaaacacgagttggagtctggaagctttccatttggcgacgtgtttctcccgtctacccgcgacccacgtgctgatctccctttcgggcggggtgtacctcgataactaagaaatctacagcgacggaactaagcaggtcagacaactttcaatgatattctttagcatacactttacatctatatatttagcagcatgcccaggtaaaggagaccttcgtggaggtatcacacatgtgtatcctgtagataactaagatattcctagttaggaaagtccgtagtcggaagaacctggcattagtcctaattgggaccactcggcgactttggaccaatcacaggcccggattccctcgaccggaaaggggaacatctatatccatggatatgttgtacaacgagaaacctcccccaaccttcagcgtcggcttgttgacaaacgcgtcgtctctaactccaaaccaactctcggtggcctacttttcaacgtgatccgactgttactaggatattattttcttcgttcacaacatacaacattggcgtgacttcccagcatgccaaacactttgacagcatcgacactgcccattgaggacaaacaggggaggggatggcgcttttgggcgatctacctctcgctttgtgtgtcaatcttgttagctgcggttgaatcgacggtcacgtccaccgcgttgccatctatctccgatgaattgcatgcgggaaaggattatgtttggtttgtcaactcgtattttctcaccaggtgagttgaaagatgaatccaaagacttcgaggaagctgatctgactcttcgggtttcaagtgcgtgctttcaaccgcttttcggacagactgcaaatatcttcggtcgacgatggttgatgatcggcgcggtggcatttttcgtacttggcagcggtataagcggcggtgctatcaactctgccatgatggttgctgggcgagcgattcagggcattggtgggggaggtatcaacgtcctgatcgagctgatcgtcagcgatttggtcccattgcgcgaacgaggaaacttcatggccatgatcttcgcggtgttctctattggaacatcccttggtccgttcgtcggtggtgctctagtacaacacagctcctggcgatgggtcgtgagtgcttaatatacttcacaccaagtcaagctcacctagctaacccatgcatcaacaatcaacagttttatctaaatctcccaattggaggaacggcactcgttcttctgttctttttcttacacgtcaactacaaacaagagccctgggaggaaaatatcaagaagatcgattatctcggcaatgcactactaatgacgtccatcgtctctatcctactagccctcacctgggccggtaccgcctattcctggtctagctggcgcatcattatgtgtctggtgctaggatttgttggcatggtcatattccacatttacgaggccagcccttggtgcccagagcccatgatgccaccgcatattttcggcaaccgcacctccttcgccgctctgattttgtctttcatccacaacatgctcaccttctgggtggtctattttatgcctgtgtacttccagtcggtgaagctctctacctcggcccgtgctggtgtgcaatttttacctaccgtaatccttgctgttccgactgctatagtcggaagtgtcgtcctcagcaaatggggcttctataaaccaattcacatctttggaatgggtctgtcccttgtggggctggggctcttcacactccttgacgcagactcaagcgatggaaagtggatcgtctatcaaattatcaccgccataggtctgggtatgctgctcacaacgatactgcctgcagttcaggttggcctcgaagaaaaggatgttgggctagccacggctacctgggcatttgttcgtagttatggtgccatctggggaatttcaatcccggctgccatattcaacacacaatttgggcgactgtcaagccgcatatcagactcttctgttgctgcacagctgggaggtggagaggcatactctcatgtatctgcaaatttcatccggtcccttgagccgcaagttcgcgacgaggtgataagtgtgtattctgatactctgaagctggtctggcaagtgtctctgggatttgctgctctaggattcattgtcatctggtttgaaaggcagatcaagctgcgcaccgagttagaaacagagtatggaatccaggtcccgaaagaggacaaagacaacaaggaagctgttgaggcataggcagaacttcaatgaaagaattcgtctatggccatgggggatctgctctcggatattgctgtagcaaacaatgccacagaaaattatttcggcatcgccttcttaccatatgtgtaatatcatacttactttgtcttttcttcccactcgcaaaaatgcatatcctcaatttcaccacccttatggttctcatcaccatgtactgtgcattcgtctccagccatccaagtccgacagatctctgaaacaatgagcctatggttatggaatcacagttacatcccacaggcaatggcagtctcataccagatgaggctcttcaaggcaattatcttgcagcaaggaacgacgatatggcaattatgatgttgctaattccgggggaatgcaagacggtgttgaaaaaggccattctagtatcgaaagcggcatttgagtggataaagaaaaaagtctgtgaagactataagtgcaaagtcgcattcgcgcctacttatagaaggtaccctgatcttatcaagaatcacattattatggactggatatttggcactatgaagagaaacgaccatcctattcagaagcttggcattcatccagatgagatatttgacaggatcgttaaaaagtgcatcgagggagatttaaagatcatgggaattaaaaatgtctgttctgccagccaagatagcttcaaagacatcaaatcatgcgttattagcaaagtgatggagtatgtaccccagaagacttcataggctaggaaagcatatataattgcacttcaaaagaacctgaacctggttgagaagacaagccacctaataagggcagctgtcatagttgagtcttatatttctttttttcaatgacttggttaagctgataaatatatagatgaacaaacccgttttcaagccgaattggcgcaaattggtatctgatttcaagaacaacaaactgtgtgggaaataaagacatataaggcgagtgctaggaaggcagcatgaataactacattgcacagttgctggctattgaaaacagtctgtttaggagaggcaagggcagatgcaggtatatgataaaactttctattctgactactcttcctaaccattattaggttaattatgggcttatagttatcaaatcatagtacttcaacatactactccgtatatcaagggtcattcgcatctcatgcgacttgaataatatatcgaaatgtgatttcttatttttactttagtttatctatttattaaagaggggttcttaggagaggggcaccgacagccctgcctgcgaaacaggtgtgagagcagagtcatcactgggagtagtagggtgctagagaggagaagtggaagtctgcattgctatctaggcctcgggagtgcttttatgccacatagccgcttagtcatcttgctctggaaacccccactgcattagttagttaacagctaactagttagtcattaactagtaaaagatctcaccaaggaataaaatattctctccaatgttctccagtatcagcctctttgaacttgtcaataccaccgacaacgccgtcttggtccacttgccaatcacccatttccacccgttcagcccagctttctaaaactttgtgtagatatgagctacgcgaatcccaaggtaaataaccactatagccactgaaaaggtctgcctggtaaagttgatcaggccgttcggttcccggaaacctagcatttttgaatggtataccattgctacctcgagcaaacccattgcttccaatgctgaagggcagcaggagtcgactctggttaccagattgccagttgagatttttgtcggttggttctatgtacaaaccagatggaatgttctctgcccttccgtcaggaaaccagggccgattcaagggcgacttgttctccctctcccctcgaaataagagtagagggtataatggtatcgcctggtcggtattatgcaagcctggaatctgacgttcggcaagtggttgatttgtaaattcgaccggattttggagtcgaataccgggggcaatatagcgaaaggcgagacgccggatgggaagagccgagagaaaacattcgataaacgagcccgtttctatgaaagatgccttgataaccagttcggagtatgggagagctattccacaatcatacgtcgaatgtatcaaagttgatggaagtcgaatctcgatagcatcaagaagacgagtaaaggcactgactgccctctccacatccattggggtatattggtgaatctcccaagggaatactccaaaaaaatgatccacagattcctttcgacgatccgaatatgttgtaattttgccctcatccaacatgtctagataggctttcagaatgttttgtaatggccgccatggccaccgttccctatcagaccagatcatatcttcccagactgggacaaaagaggcaagctcagtttcttgatcgaatctatctggcgtataagtattcgtcttccctcaattgtactaaagcataaaaggactctcacactatcccgacttcttcgtcactctttgttcgtgttgagggatatagccacacataacgatcaccccacgatccgagtgaagattccggagcaaaaagttcatgttttccatgaagcgctacgaggtaatagaagagatgaaaatttgaatcagggtcaaatatagtggccttcgccgaccgtaggaacctgaccaagttcggattcaggcgggatgcgagatcgaatggaattggcgagaactcttcccaccaagttctagacgggatcgaggcgacatcccgtccagccccaatccatgcctgtttaaggatctggttgtgaagttgggccgataaatgggggtcaaatgtagtgaatgacatattggctaagacgtaggtcttgagagacgccaggtcgatcttaaagtaagaaataatgcattcaactaaataagtaagatagatagagaagatagagagagaagaagcaggttgcaaagtgggaagcggcctgcttatatggttgatctttgcaaacaaacaaataatgcaaacttcgagcgctcgcttaatctcgcctagaaagcagacattgcaattgtgacagatcttcccggacctcgggaattccggtgggagatgtagaacgagcggagcggtacggagtacttcgacacagataggcaactacctctagagacaattttcgaacatagcacatagatgagctgtttctgccctcttctgatgcatcccctagcatcgtcaaatattcaactgctccggcacagatactcaggactatacgggtaatccaggtagccagttttcgtgagacacgtatagaatgaggagcgatcgtatttctgtagggcgatgccattcttcatccgaaaagggagatcgggcgtggaggtgaagtatctcccaaatccaatagcaacattgtcatagtctgcatacaccatttcaatcacctctggggccgacgtcgcatcatatccgcccgccaggatcactggcagggacctcccccataccttgacaaaggtgaggtggtttggatcagggtgagtcgtcatttggtccaaccaccgggagttggcgaggtgtaagtacgcaatgccgagttgtcgaagctgcaggatgaggtattcaaactggggaaccaggtcacccatgatacccattccggaatactggctccacggggaaagcttcatgccaactcgatccggaccgattgcattaattaccgccatggtaacttggagagcgaaccgtgctcgattcggaatgtctcctccccactcgtcggtccgctggttgcacgaggcctgcgtgaactggtcgatgagatagccgttggcgccgtggatctccaccccatcgaacccgacctcaatggcatttcgtgctgcttgcgcatagtcagagatgtacttctgaatctcctcttcgtctagcgcgcgtgggggctggcaccctggctctgccgcaacagcactgctcgacacctgttcaaaccctcgggatgcgagcaattccgggtcggcagatcggccggtagcataaatctggcagaagatataacattctttggcatgaacctgggaaacaacctctctccaagcttcgcattgtgtcttactccatatccctgggatatgtgcttcgccaactgagtttgggcaaatattcgtcgcttcagtaatcaacagagcccccggatcagatgctcgctgggcgtaatattctttcacaaacggcagaggcacagcagcctcatcagctctatatcgggtggttggcgacatgacaattcgatgctggagctggcattttcctagcgccagaggcttgaaaagcgttggagacgggtgtttggggataatggtcatagtgaatcctaggagtgtctgactcaatgcccccgggagaacttgacgtgagtaaaaaaccagaaacattgctttatcataccttgtagatgagattcgttctttgttgtccctcacttatgcacgagaattgaattccttcgacttcgcgttttgaggcaagggcgccattgagcagcacattacgcgtctaccaatcctaaagcaagaaagaccggtgtaattgctgcaatgtcacgagccaaagcgaaaaccaatctacccatggaaacctgaccgtgtggtgtagatgtatgttcatgtaaagggctgtgagggatacagcgtcgatcacacaagagcggtctttgttcaaatgaatagagcacgaaaatgatgttcaagaatccaacacagccatgtattccaaacagagagtgtggaacgaggcagggatgatctcttggggaaagtccgggcttgatcccgcccgtggaggggccggcgaaggagggggtgtgtcgttgaagcaagggatgaccaaattggagtataaaagtgcactttcatcctttcctggagagattatcctcattgtccccattgccatattttcttgtccatctcaagagccttctcgttcagggcctctgcctgatctggaatttgtcagctggtcacaatatataccagattggaagccagcaaacagcaaatcgaacaagatgagatcaccaagtctcccgcgactgccagtctcagcaagacccgaggccattctcgatatttacaacgattatggatgtgtaattatcgaggggcttctcagttcatccgaggttgcctcaatgaatcaagagattgatcctggactggcaaaacttgctcccggtaaaaacggggtgccgttggaagagttcctgggcataaacacaaagcgattgccactggctccaaatagccgtactttccgcgaggtgattctggagaatgatctgatgcacgctctgagtgaatcgatattatgtgacagtcctggggaagggtatcatatcaactgtgcacaggtgattgagatcggacccggtaacgcggcacaaccactgcatcgagatcaaagtgtatggcctttctgggacctgattccatctccagcaccggaggcttgcatcaacttcttttgcgccttgaccccatttacggaggccaatggcgccacaagagtggccccgaaaacgcatcttgatgtcgacctaaacaacttgaatccgccccaacttctgccagttgagatcaaccccggcgatggatttctcttttccggcagacttgttcatggtgggggagagaacaggaccaatgagtaccgtcgtggtatcacaatccacattgcccgcaagggcctcatgacggaggaagcacatccactatcaatccctcgcgagattgcagagaccatgtcttacaggggccaggcgatgttcggcttccgaagcaactggccgatcaaggatggacccgttgggacctactggtccagtaactttgacgagattggtggccatttaggactaaagtctagctagcgcagaaaatttacttcatttgacgtattggtattctgtcaggtcccaccttaatgcttcggacacgttcgtattttacattgatacacgacccgagtttcaaatcctgtctgtcttaggttttcaagtcaagttgggatgaaatacttcctttttggcattatctaggtagtataatatgacgctgttaacaagatggttctccctctacaatatctctaatttcagttcgatttgctcacactggggcctatagcatttggatgatattatcggtcgtttgaagagaatgctgtaaatacagaatgaagatgaaacaagtcattctccatcccgacccatcaaccagcgaatgagatcatctttgacaagtgcttcaagatccttcgcaggtagcgtgatatgaacgtcccaacctgcttccttttggtcacaagtgagtcgtttcgggagaaaaatgacatcaccctcaatcaggccgaacgaaagatcgaaattgtggacaattccaaaactgtcaccaaaatccagaccataaatatcaagatgtcgccaactagaaaaagcaaggtcggtaaatatcatgccggtttgactccaatccttctggtttgcgatgtatgtcatgcagctctggaaatattttctatccatgtttcgtactttgttcctcactttgcacgccaaatcagtcaggaatcggagttggtctgtctgaattgggcaatcgtgggttttcctgcaagacaaacactgctctggcccggtatactccgggcctggagtttttaatcgaagattacatgccatgtttcccagaaactctcttgctgcggatagctcgatccgaccgcgcatgttgactgccatgcataagtctaggcagtcatatgtcttgctttgagatttgaccctttgtattgcgtccgcaagagccgaagtcaagacatcattgctcgacaagaagggtggaagatcagcgacaggaatagacgcactatttggctggaacatgcaggcgttctttaagacttgagaacattggtatttgagctgcaaaattcgctcactgttgaattcaaagcgacatgttctgagcgacgctgcgtcaaggggaacggggtgtattgccggcgcaggaccaagttctgccgtgtgatcttgggcaggagacgtgtctgccagtcccgcaaatatagcgctctgagctcgatcttgctcgtcaatgatgagcggcagcggggtaactgatgggtctcggcagcatcttcccagtaacgcaaggatttttgccgcgcctgttccgtcaaaaacaatatggctgaacgtcatcgccagcacgattgcatccgtgaaaatatttgcctggaaccgaatcacaggctgtctttcagtcgagggaataagcggtgggagcggacaaagatgctgcttggagtcagatgtctcaagcattgacatgccactctgcacgcctcctaacgcgctttccatagggaatgggtgatgcttgtgtaccaggattgtacggtcttcttttgtacatggtatttggacactctgaatgttatattttccatcgagctctggattaacgacgatgtgcccgagtagaaggggaagcacttttgtcaaacgtgtgatgccggcttccaacagagagagacagtgcgtagaattcgctgtctgaaaagacaatagataggagacatatgcctggggcgctatgtggtccaggggactgaggatcactgagtgatcaaaagaggtagacatgccggagtaagaagcttcgtttgttacttatgataaaaggtgaataactttgaaaatcttgctacatcacggcggggggaaggaattattatctagctgaactcattagaaccatgtctaagttactaagacctacattcaatacactgaaataggtacttttggccattgataacgccccttgcagatcatgcaccaccacctgtgatggcgaatgcaaatcgatatctagctcagcagaccgtctggtaggattgcatagctagctcataagtacgaaatacatgcatcaatttaacactagtctcagtaattactaagccataaatacagggctcaaaaaagcacaccgcaatttcatttcctcccttatctgtgaattctgtgagctgggcattgcttccgagctgtggtatctaagtatgatgctgagaggaagtccatcgtagtcacgatgcagctcctgtccaaagtagcccgggtccgtctccagcaccgatgaggtaatcaggcaatgatcgccgaactctgacccaaaggctttagtgcacacttcgtgtagaagtggttgttgcatgggatatatgtggaaggtcttgctaacagtgaaagactactgagctgcctcatgttcgccaggtagccgtcttgcatcgttttctggccgaattcccacattttcttgcattaatccaccttactgtcgaaggctttgacctgctcatcgatgattagggctctgtctgcttgaagaatctggaacaccttgaggacaggctttgtcatagtcatgggtgatgtggtagatgacacggaggaaaggagggttgggaagtatcagagaatttgcaaaatggtatcttgcaatttcttagaggtttacctttccatgtggttgaggcaacatccgtcagtacctttgttttttttttttttttggccgcgagccgttttattatattatatcgatcaagataaagacgaaatggagtggaggcctcgatcacatttccagactggtagttgaagactctcgtaaaacaaaaaaagaacgagaacaacaagggtagagagttggctaagcccagacgtgcttctcatgctctgctacatccttgaaataccgtggggggtttcccgtcacttccaccacagaattgttgagaacttcttgtgggccattcttgacatcaacttccatggccgaaagcatagctgcaaagtctgcaggtatccctgccttttttactaaaagttcagcaagtccagtttctgtaaggctgcggtggatgatttttttgcccaaaattgtggtgagaatctccgccacctatgtattattagcgtcaaaaggatttatctacaggtattgagttgggatagagtcatcttacctgcccatacgataggagctctggacctaaaatgacatattccgtcttgtgcgatccccactcagtcaagcaatgaaaggcaacggaagcaatgtcgtcggctgagacgaatggaatcttaccatctccagtcgcggttatgatttgattttcgttcttaatccactcgcgagagggatcttctaatagattctctagaattgaaatcaagcttagccatattatcgtttaagattatagcgtagaaaaggataaatcgtacccataaaccatgttggtcgtagtgccacatactcaacttctgccagagagtccagatatgcatggacctgtcccatcgagtgtccacctttctcaacagtactggcgctgagaaggacaaatctttgaacccctttagcgcgagctagatcaacgaattcgatcataggcggggctatatccatgacaggaggcccaactagataaatggacgagattgtacccaatccatgcttcccggcctgttcgaatggtctctcccacgtatctcttttcagccagttgaactggctggatttataggggtcagagggagacgccgagctagatccaactagaaatggagttttggcttggtccagaagtgccgcaagacgactggccgttttaccccgcccacccagtacaagaatagtcatcacgaaagattcttgggtgcaagtttgcaaggaagacggtttgtattacttccatcgaacttcagcggtgggggtatatatgttaacttcatttacgtcgaacaacaagaatccagcagaccgcttatgttaaccgaaacgcaagatatgactacacgtattaccctataattgaaaatggcatatccaagaacagaaaccgatcttccttgctttagccttccaggatcatggtctcgtggatattggcagtgcccccgaggcgggccgagaaggggttgcatcaaatatacgcgtcctgtcgctgtgccctgatacagcccagcgcccactggggctgacggacattgatgcccaattttgaagatcgttctaagtgcagcaccagtgcatcatggattctaaccttggaatatcggttctcgactacctctgtaagaatatataatgagcaaggggcttattgcagtttccaatctccttttttccatcactaaatacatctcgataatttgagacctgtcacataccgtatccattgtcgaaagtgttgtttcgtttaccgcatgcaacgactgatcctccgaatactgtgaaatgaccgtttacgtagacccatcaaaaagtgcagcaatgtcatcttcataaagctgcagagtgggtaccctagctagtgtccccttaatagtccggacaaatggcttgtccttccgagcaattattgtcagtttcggttccagtttgaggagactcgaatcgctgattctggaaaggtacggttctaagctctcaaagaaagaacgccgcccgctttccgtgtcgacattgaccccgtttgtaatctcaaggagaaggaccagatcggagtacccgttgcctcctatcaaagcagcctctacacgcgggtgttgctcaatctcccgctcaaaaggagagacaaagtatcccttcgcatcggtgagggaaacgaagtcatccatccggcagacaatcttccagagccctttacgagtaggatgctgaacccacaaatccttggtctcaaatctctctagctcaggaaaggcaataaatatcggctgcatgacgcattctggtcgacggacaaacaccatttcataaaagtcatcagcccgatgctcaaactcgacgcctgcatgtggctggaacttgaagtaatcccagtcctctttgtcgtccggccgtgtctcggtgaaatgatgtcctgactcggtacagccaataagaggggctaacttggtgtcagagattatttgattccccaggtggcgcgccagaggagcgccggcatagtggacatattccaggcttttcaaagcttctgcgccatccgtgaaagacaacatctgactcaacagtagcggtgtgcatatagcaccgtccgcgcgggcatagcgcaagatcttcgccacgttttctggggattggtcgggaggtggaaggatggctgtcatgttgacgaatggggggatgaagagtaccgttaccatccccacatactaccacggcgttgttagtacacgagacaaatgctattaaaccagacagagctcaaaactcacatgcaatgttggcaagtgtgtataccatcgtttgttagcgtattgatgaatatggctctctgcgacatctggcaagcttgctggagcttctagattggccaccattcgaaatgtatgggtgattggcttaggagggcctaggtgaatatttattgtgattaggcggtccctctcttgatgaacgaaagaaaattggctcacctgttgtgccagagctgtgaaatactagccatgggtcatccttcgcgtcatcccagggcttggtgtattcaattgcaatcggctccgtgtctcggaataagtcatcgagacttggggcatccatgtattgaatttctggtgcatgctcaagggctgctttgatgtcattggctacatgctttgtacttaggtagacttcacactctgcttttcgaagcacgtgtgcatgattttctggcatcatagacaggttaggaagaatcaacttggaattctgttagccgggaaaaagaaacgggaaatcatagacataccttcttctgtaactttcctgctgcgagagcaagaattggatagcgaagatctttgggtccggcatatgcaaaacattgaaaagaccgcgaagatggaggcagattgtgcaaaagccactgtgccgcatgattggccgcatcgttcaattgtttgaacgtgatatctctatacccttcgcacacttttccttcgtcaaccgggatcgaaatccacgaactgtttggttcgtcacgcgctcgctgttcaatcacagatataatgatgcgctttccatgctggacgccgggaaaaggcagatgcgtagactttgcggacattttaggttttctggcgcagacaatgaatggaaagtgcgctgcttaatttaaagcttccacaaccactagcttaggtccgacgatcgacattattgcgtcctagctacctaaatcagggagcgatcttgcatgaaccaagaccctcatcgcgatacaatctggtttttcttttgaaccattgcatcatcgtatgtattaggtgggctgaaattctggagccaacttgccgatcgcgttcccgtcggcccttcccatcttcgcaatactagatgcgccgtgagatatcaagcccatcttatgcaagaattaattattgaacttcgtcttgatccgcctttgaaacaatcgctagtcatgggactggaattcggacgaaatgagatgtgttccctttaactgcaggtgtctaaatttagaggtaaaaggattgacagtaatcgaggaaacgatctgcggtgttcgtgtgtgttcgtgtcgatggttaccttcagtggtatgaaatggtggaccaatttcagcacgtgatctgactaatataaagtagcccagtcacgtggtgatcggcactaaatcacgtgcatctggatcctcagcggcctctaagatagaattcaaagtctctctctatgacaacgaataacatctctaattatcaatttcctctatctctaaaaagaagccgaaaccttaaaacagccatacggagtactaactatggtgatccccatctaacgtctatcatccggtcgtcgccgcttaaggcacctcggctgcaggcggctacatacggctccagacggcctcggccggtttcgggtggcttcaggtgttagttttctccgtgataggaaaccttgttttcgcaatggaagaatagccactacttgtggcttgcctttctactcctactattctcccctttcgctcttacacctcttcaagtctcttccaccttcctgacattgctcatttactcaactcgactgcaaccatggacataactggaatgtggtgaagctaggccacttcgatagcctgaaaatcggggcgttttgccacttcgagaaagcaattataagcgtgcgctaagcctttttggcaattccgtattgaattcttggcatatttccacatgataacaagccattcctaggctcctaaaaggaaacgaggccctatcgaggtaatgcgtataggcagttggacccgtactaggagtccggagagttttaagccgggatgtacatatgcgaggtatcgaattcccgagagaattcttgaccacttaaagacatgtagctggctataaggggaatcctcagtaaacaaacaacacatctcagcactttacactcaccagtgagagtttggataagacactaatgctcgttctcacctatgccagaaaggtatcgatattctcgtgcatgtcttcatcttctgttatatcagtagctcaggggaagaatgatcgtgttagtcttgctgcagcctgaaaggggtgatgggtcacgtggtgattgtatggcgacatcttcgttcagtttgatattcacatctgaaattatgacaccacaagaaggggcgagtgcgtaatagatagggagagaagaaggatgagagcgggtgaaattatccacaacagtcgcgcactgaccctctctgttgattgccagatacactcattcgcttggcatctgcacagaacaacctctcagcccagccgcggaggtgggttaatgctgccttcttatgtcatcagtagtggcatctcacaacgtagtcaagggttgatatatccttccaactgaagaccttttttgtatacaacgagctacaatatacaaagtttccccatgatggagcgcgggcggggcctcctttgaccctacggtctagagcatcacagcataaaaccggagctagaggtgacccgttgcggctaaacatgcacattactgtccctcttgactacgtaaggccatcaaatacaatgaataagaccaaagcaaatatggacagccctacattacgattcatttatccattacggagtcttagccgcaggttcagctggtggaaactaatcagtggctcactaatccgatggtttgatccaacggggcgcaaaatgtgttctaacggggcgtaaaatggtcagagaaactgctcgagcgcgggaatcaaaggagtcgccgtcttggcgaatgcggttatctcatctcctggccaatggtgagagacaatacaagccgacgttgcctccagagctattcgcggcattgcatgataaagataacaaagataaggaagccaattcgacccaatgatggcatatttcccggggccccgacgtcttccttcaggtgtacctcatcaacgtcgccgatccgagcaataggcaaccagttccttctgttgataggacagcacgtcgaactcctctcccgtagccaatcgccaccagaccaagagatatacttcggatcctccgtttaggggggggggcatgtacttttggctttctatagttcgccacttggcagtttcaactcgatcgaaacctgataacgttagaatataaattgcaatgtccccagatcttctctcggggcattcgttgcaacagcgatctttttcatccttaccttctatctctcatctcgggtctcgcacccattgacacgatgtcgggagttgaaaagcctttaagcgacaccaaaggtgtcccaagcaaagatgccgaggagacaattgtaggagaaatctatgaggatggcgtcgaccatggcgcagactctgggctccaacgccagctgagctctcgacatatcagtatgattggtcttgcttcgtccattggtatgggcctttggctaggatcaggaacatctttgaaaaatgccggtccggctggtattttcttgggatatatcctatctggcaccatcatttggagtgtcagtcagagtataggagaaatggcgatcatgtatccccttcctagtgctgtgagtttggtggcttctctcttgccgactgatcattactgacccggccccgctagttcgtgcaatggactaatatattcgtcgatgaatccgccggtttcgcgctcggttgggcttactggttctcttactggatcaccattgccaacgaggtacaaggagctatcacagtactcaacttctggacaagtgccgtcccaactgccgctttgatcactatattctggttcgttattgtcctgatgaatgttggagcggtcaaatggttcgccgagatcgaagtcgtggctgccgcaatcaagttcggtttcatcttcgttgtaatcatctccggcattgttctttccgctggcggtgggcccaagggaggttatccggcgagaccgggaggcactattggcttccagttttggaacgagatggcgtttatcaatggtttcaaggggttcatctcggttatgccgacatgtatcttcgccttgtctggatcagaaaatgctggtctagtcgccgcagagaccagcaatccccttcgatctgtgcccaaggctgtcaagtcgatctgggtgagattgagcttgttctacatcctaggaagtttgatcgtcacgatcaacgtcagcccaaaggacgaaaatctgttcggtgcatctggcaccaattccagtcccttcgtcatcatgtataggaactctggagtggctccgctagctcatattatgaacgctgtcattctcgtctctgtcctctccactggtggtatctctggatacgctgggtcccgagtactcgttggtctcgcacaacttcgcatggcccccaaggttagtctggttcttttaccccgtccgagagtactgctgacaaaatgcgaattttccgtgtaggttctacagaagaccgatagctggggtcgtccatggtggggccttgcgcctactctcatcatcggaggtgggctggcctacctgaacgtcagcaacggtggtgctaccgtttttggctggttctccaacctgacctctctattcactctcttcggatggggcatgatctgcctgtcacatatccgtatgcgtgctgcctggaaagttcaaggccgctctgtcgaagaacttccttggaaatcaaaggtcttcccttgggctgcctattggggcctgttttggtgtgtagcacttatcatcatcgagttctatctggccgtgtcgcccttgggtgacaaacccagtgcggagaacttcttcgccaattacctctctgtggtggctattatcattctttatattggcgcaaagattttctaccgcggtagaagatggaacaaactcgaagatatcaaccttgatgcttgtaggaggttctatgcaccacgggatgaggaggggaagaatgagaagagcttcgccaagaagtggctcaagtttccaaccaagaactgaccagcctatgggaggttatgtataaatccactccattgttgggtattttagtcagatttcaactttccaaatacatatgttgtatattttactgaactacttccgtttcatcctccacctaatttattttggggattgaaccaccaacccccctttttgttaattcgaccccgcctgcgccatatctcaggcataaactgaccgcctactagaactgttcaccgccttcctggccgctatgcctacgatttgtatgtttgcttgcttattgctgtttgtatgtttgctagatttctcagcgagaagttcgaagcttacaacgtttgcaaagggtcaaccatataagcaagccgcttcgttggtggttcaatccccaatatatattgcaagccctgttgggtaagtacgactagattgcagaatcgcctcaactgttgaatattaacaaatgttgcttcatgcacactttaaccaagaaaaacgagaattgatttcaccaataatctagttcaaatgcttaatttcgcccagctagggcaaaatccaatcagtaagaacgtattgccttactataacaagacgagttgatagcctggattatgaagaatgaagggtgaatgctacgagtactgagcgatatagggtgcacattctttattgcatcattaaagtcacaaccaaatttaaagcgttactagaccgagagccttggacggctgtgcctgtgaccccagcgagaatgccccagcttggcaacatcatttttctcgacaactgatctaatcctctgctccatccccctttgctctctcggatacatgatgaacctgacttgccctccttaattcccgatcaagtacctcagtcaaccgcccaagcagccactgaacctcactcgtttcggcaagcaaaggattctcctgatcagtccaactccattcccgtgctgcttgcgcctgtccatcattggcttcatctccaagaaccttgggtttattatctccttcaatcaggctcatataatattcccattctagataatcgaatttccgggatggagtgttgctggcgtactcaataattttgcgtagctctcggaagagtaggtagatgtactggtggatgttttcggcttgcttttcttccttgttgttcttgaagtcgaagtcgttgccgttctctttattgggatcttgattttggctgaattgtgcgtgctgttgtgcaccttctttttcgcccgtcgtttcctccatccaccatctgacccaggagatgtgagtcagtgtcttaagcctgtccacgaaggagtggtcacccggtagaatagtgagctcgccaatgaatagcgtaacgtcacgaataaatcggatgacggtatcgccaatattggagatgagaatagtaatcgtaggaacggcaagcagggaccaaaaaacgaagaaggatttacccaaactactgatcggatacaaatctccataaccaactgtcagaagacttgtatatgcaaagtatagagcctcaaagtacgaccattttgcgttcgactccgagcgccagaaaacgacacctccgatcagccatatcgtcatccaaagcaaaaaagaaagcaagagcgagagccatttgtgttggacgtttgccagcttacatacctgacgcatggctataaactctcgtttgcgctgctcccgctcgctgcggccttccgctttggcactcttcttcccgagcgaggggataatacccttagcaccagaacggtccgagaaggcttctctgagtaggtatttgcgcgtttgtgctgtcaacatgttgccaatcttttgcttgccattttccaacataagcgtacggatggaggatatgataagaccaaggataatgattcctccgattgcatatgggaaaagcaaaccccggccgagatgcgtacttggcgagaaattacccacgccgatggtgagcaatgtatagtctgcaaaatatactgcgtctaggaagcgccatccctcgaccttagagtagacggctgcaccgcccagaagatagaagcagaaaatgatagtttgcagcatgagtgttcgttggctcgtagtcagattgaattttcggctagagtagccacggtaggcaccatatccagtcactgccattaatgacgcgatgatgaaatataaccctgctgcgaatgtgccatagtaataactctgcgagtagattcgaccgttgttctcgggcttgtacatgttcacgccgaagggaattaagattgcgatcaagaacgccgatgagatgtaccaccctacgacgatgattggctgggcgatttcgaaacggatgcgtcgggccatggtaagcgagagggctaggttggcgacaagtgcaaagacaagtgatattgcgttgatagcggtgaccctgcaaccgcatatgaggttaccgggagaatcattcagggtatgtctgatcatattaattaccattttggatccgggatatctgtcccaccgctgctggtgaggtccattcgccatggttgtgataaagaacagatattgaaagcgctagccatcggcccgaaagtgccctgaaaagaataatgagaatgtggacttccaaagtaaaggatgacatagtaggtttctgcatacagctactagagggtatgccgtacttgcgagccaccaacgcgcagcttgctggtactcggtatcatgttgcgacaacttattgatttcgtctatcttctgatttggagagctggcggtgcggtcgagagccactgcttcgtcggcaatggcgtcatcgaaaccaggttcgttcatttcgtgcgtgcttgatacaagggaacctcgtgtactctgccgtttgatcacgacctcgcagctggaatacggaggatgggaagcagctagaattccaggtagaaaagaattctaggtagaaaggagagacagtggggacagacatcatatgcataattgacttcattggcgcattcaaagaccaagcaaggcttgtcgcaagcctagtgacgggatgtccgctatgattggtcgacaatgcggaggggaccgaataaaaagcaagatctgtcgacgtcataccacgtggcttccatgttttggcaattaccacggaacttctattttccgcagatcaacgagaagcttggttagggatattaggatcaacctcacaaacatgagtgttcggtcgacaatgatgacaagcacttcatccggtccgcaccaagctataatatgccgtacacacagtgcaattattccaagtttcttataattagagatactttcaccctacaaattcagaatttgctttaaaagcccttgcagctcttcagccttcgcacgtagtcctccacttagccccgcttccattaccatgccagtgccgacattccttccaaacatggactctataatgctatcgttggagctttgaatatgttctataatcttgtcagtcacgagtatgtggcaagaatacaagtcacataccgagatccttctcaatcgcatccaacgcatccagtaatatctgcacggcattgagaatccgcacgcacccgtcattcgttagaggtagatcacccagtcgcaggtcccaccgtagcccagctcgggatgatgttgacgatgtcgagtctggaagtatggtaaatagctgacgcaggtcgtggaacactatgtcatagatgttcaatagcgacatgtagcatgacaacatcattaagagggtgggtgtgtccacaaagtcatggctaccggggttgaaactgggaagcccggtccgcatccatttctgtcgggatacgatttctcgtagccattgcgcgagataggttgctccgccaatcgggtagtcgtagatgctgctactgctgtgctttctgtcgatgtttgctctgcggtaccgttgcaggtcgcttgtgtagtttgtcattgcgacagggatcaaagagaggccttggacttgggtggatggtattcggacttgggagttcgggttgtcgggcatggtgctgtccgtgtttggtatgttgagtatttctcttatgtgatttgtgtcggcttggttatagtatgtctggtctaacgagttgcttgattttgtaagatcgagctctgggctcggcgactcgggagagcaccaccattctgtctttcggacagggaatggcatacaaattggcatgactatctggtctcccggggtgtggaataacatatccgccagaatcgggtccagcgatggatcggccaggttgtgcgggtcggcgatgggatcgacacgggagatcgatggtaaaggatcgtcctgcgatgcaagaaagccgggagacttcaatggtggcgtcgatgcgtttgattctgatgagtatgtggaaggaatctcttccgtcctgtcgagcttcttgggctgccgcccactgcgagcccgccgactgaaaacgcatggcacccgagcgcgcgagcaccgttggcacgtgttaagccattcaccgtcagacgatggcacgcaccgcagtttctgtaatcgacatcgatcgcacgatgtgcggtacgactgtgtgggtttggcggaggctgacatattgatcgtagggctggtaaggctaataaggctggtcaagctcacgataccaatgcttggctgttctgatcgtcgtcaagatgtgatagcagtgcgtgatctgacgacttggctaaaattggcattgattgaaatcttaagattttccgtgtcggtgggtcagatccggttcttgtatatatgtttggattcgaagtggaggacagcctggaacccaaaataagaacggaccatggcattcagctgtgtagcgctggacagaacgcccctgcatggcgctatgaatatcgattccatagccaatctatttacaagaatcgccaaggcgctgctgtgatccttctgagtggggctaatttggctgcaggcgggatcacacgtcaggtcgcttgcagtggtttggtccaagccgcgtctgcgggtctctctcgctgtgtatataggctgttgagcatgtcttgaacagttcagcatgtaagcgacaacgtttctgatgtatgaatgtcgcaaggggaagaatatcctccagctgtgcgctcgaacggaacaagaaaatggcagcgatatcgctccgataggtttgacacttatgcagacttctacttcggtgatatggatatcgggacgggtgccgtcggctctccgagagggttcagaagtcagcagataccgaatcactctgacgaagtgaatgcctttaacccgatcggtatccttctcgcgagatacctctggccacgtgggtttagccatctgggcgcatactattcgggccaataaggctggcaggtgaaacgcacgcccagggatcattgccgttgttatgccgtgcgccatagtggcatgagcgggtcagcggaagaaggcgcaacggcatcccctgcttggccccagcccttcatggttacttcgcgtcttgaataatttcttctttcatcttgttacgaggacaaaacaaccaatcgtattgccaacagattggcgtatcatagcattatctttaaatatcttgcacaatattcacagcgtgactgtcgtccgactccggagccattctccgtaacggtaaaacagaatcggcactggcgcaaatgccagcgccagaaaccctagcagcgtattaccccacccgtagttgagtgccgaatacatatgcgacccggcaagcggcaagaaggccccgaacattgagcgaaggagaatgttggcccctagcgcagatgccgccgcttctgacccgaatagatcgaccagatacagctgggagggcatgatcacgaagaaggctccaaacccaacgatgaacgttccaaatatcggagccatccaatgcacctggtgatatgccgtccagccgtaaatgaacaacccaggaccaatgactggcgggaaccacatcatcaggaccagccggtactcgggcttaggttcctgaacattgtctactgccattttgctcttcaagatccggtcgcttagtatgccaaatgtaactagccccacgagttcgccaatacctaggccgaggtaggccagaccagaaatgccggcgctgaatccgtactgaccttcaaagaccatgctaaaggtggcaaaaaggagatatagaagtccgaatatgagagccacgtagatggacatgacaagcacgatcggcgaaaagatcaagagtttggtggggcgtacgagtgcagcgacaatgatctgctgctttgtaagaccgcgatcgagttttgatcggaggtgaaggttcccggttgtgcgtcgcaagtatgcggccttccgttccaatagggtgttaggatgtgtttcgcgcatgaagatgagcgttccgatacccgctgctcctccctgtcatagtgttagaatgctaaatactagatcagaacaagaccgcttacgaggatcgcgaccacccagaaggtccaccgccaatccttcccttcggcaacgaagcccccaatcaccggtcctagaacctaggtcagttagtatatttcgactacatagtagatgcaagttacataccggtcccagaagcgggcccagaccaaacaaggctgctgccgcaccgcgtttctcgatcgggatgacatcggcgatcgttccaccgcccagggaaagtggcgccgctcccgcgcagccagatagaaaccggaagaccagaaattgagcgggagtttgactcacggcgcaggcgacaacaaaaatgacgaagagagtattggaaatgtgatagacgacaaggcgcccgtacatctcagagagcgaggagatgacgaggggacccaatgcaaaccctagcagataaatactgacggcgaaggttgccaatgtcatattggtgatctccaggtccctggcgacgccctccattgccggagcgaccatggttgaggcgatgttgctagtaacttaattagcatggtcggttgtttttgtctcacccaggaaacgacttacacgaccatggacaagatggccacaatcacgacatgaccaaagcccttggtggcaggccagttgagggggtttttagggtcatctgggccgtcccagtcgaccacatcgtcctgcagtttatgcgacggcagcttggcagcctcctcgtctgccttcagctcgacatcaatccgagtccgctcggtctcatcattactagagaggttcatcctacagagtgtactcggtagtgggaccaaagggaatttgtcgtttaggacaagctttgcgcctatataataatagagaacgctcccaataattgcaaacggagatggatggaagattttctcggggattcaagtccatgggcgttggttacatgtcgtttcctccgtgttgtaaaggccgagctggcttgaagccaggaccagggctcggagattccatgactactcaaattgggtattctcagcgagaggcaaactattggatggtggtggaacgagtaacggagcggaggaatagacggagatagagagtcgtatatggaggaatccaagggaaggagagcaagacggaggaatgcacggcccttggaggcacatccatggatatgacaagttcgtccgattggtcagaatcctcgggagctgttgatcctccgcatattacccgcgccttacccgatatggttaggccatagcggacctcgggcgaatgtttacggcttccctttcgttccttgtcaatcaccatcggacaatccgagtacccctccatctgccatcattctcgtattgatgcatgctcacagctcctgatctttttatctattggctctgaatttcttccttagtctctatgtggcgatacaatcctctacggcgaaaacataccccacccattcccccacacgtgtgatggagaaccttgaccaggcgccgcctcgtttagtctaaacgacctgtgtgcagaggagtggtctggcccagcatatcacatatattcatacggtcgcatagctggaaaacgtgcacctgcatatccgcgacagccacaatggatcctccgcccgcagacgaacccaacccccaaccggcttccattaatcgtcggagcaaaccccagctctcttgtaatttatgtcgtcggaggaagtgagtgccaaacatctccgactttccgaatcaaatctgacagaattctccgataggctccgatgcgaccgcaaccagccttgtttgacatgcaccgctcgtggattggcactatcgtgtgcctatcccaataatcaagctccacaatcgcctagaccacatggggcccacagggctcgcccccaagcaaccgtccaggaccgtttgggtcagctagagcagattgtcgtttcgctgatgcagaagaccaccgatggccaagatcgaccggaccagcatccagtcgcatcagctccacaagatggcccccaagaagactcgccgggactggccattaatactgcagactctccagctcagtccgatggcggaagtgtatggtttagctcttcggacgcccagtatgtcggaggaacccactgggccgccatcctggatgggatcgccgacatcaaggagcagcttgaacaagaagattatgggaacaccgagaagcctgccatgctgcatacctttctgctgtatggatgtaaatcagcgagtaaagaagatatcttggcagccctgcccgatagacccgctgttgatcgctacatttcccagtactttaatcgattggacttggcgccatgtaagcccctgccatccgatatgcgaacaatgactaatacaggcattatactattcagcctgtctacacagtggtcagttttcacgcgaggtatgcgaaagagtttgccaaatagcgtgagtagaatgtggttctaacgacaataatgtagtatgaacggttctgggagaatcaagctcagacctcgatcatgtggctgggtctccttttctctatgatatgtctcgcagtgctggcttcaagtgcggcagactccagctcatccccaggagtccgcaatccgttggtggatacgtaccgcgaaaagatagtacaatgtctcattttgggcgagtacacaaaatctgggcgttacatatttgaaaccctatatcactacctgactatcgagtattccatccgaaaggatgccgaccgggacatctggatcctctcgggaatctcggtcaatatagctctgcgcatgggttaccaccgggatccatcgcacttgccaggaatctctccattcacaggagagatgcgacggcgggcctgggccactatcgtgcagggagatatcctgatatccacccagatgggcatgccacgcatgatcaaggactggcaatgtgataccgtagagccccgtaatctgaatgactcggacttccatgaggattgcaccgagcttcccccgtccaggccagagacggaaatcactacggtttcgcacctggtcgctcggtggcgtatctttgccgccttgggttcgattgtggatttcaccgcgtcggtgcggccggtggcctacgatgaggtgatgcgactagatcgcattctgcgtgacgcggaggcgacagtccctgcctacctccgcatgaagggcatggccgcggcggtgaccgatcccccgcaagtgattatgcatcggctcttcctcagactgatgttccacaagggtcagatcatgctacactgcaagtatttaaccccagacccatccgcatcttccaatgacccagtatcatactcctactcgcgtacctcttgcatagaggcagccttgggtattttggagattcagcgaatactcgacgaggaaaccaaccctgatggtcagctttatatgatgcgatggcgggcttcctccttcataaagcatgagtttctgacagccacgatgctactgtgctttctcgcgcgacagagcaatggtagcccgaatgctttgaccgatggccacgacttaaaccaaatcatggcagcgctaacaagcgcacatggtatctggatacggtcaaggaattcatcggtggaagcaaagacagcagcagacactctcagcattgtcctgggcatacactcgggtgattccaatatgggcgctgagggccaggctatgaacaataatttctccctgaattcaggtcagtcggccgtctttgtttctctagccagtccttgcttacgatagctcagccctaccgatacccttccccgctggaggtttcaatggaaacggtctggaagagaacctttattatgggttccctttcatggggtccaatcagatgttcccaggctcaaccctcatgatggatccgaatctcgcatggcaatggtaaaaggtgtgttacgactacaatgctccccgccacatctcactgacaagaacatagtattttgaaacggattacggcaggatagagtttggagttcggcgtgttgttgtattcggaatttttcggtggaatatcaccttagtgctgatctgtccaagcctcgatgagacgatcagtataccacgaagacaatgaaacctgcgtatataatgaacaaacttcctcgatgtcaatcaaatacgtcaacaatcatcttgtattctcagagctcctccctttcttcaacacggattaattgaaagacctgccccctatgcctgaaccaattgccatcatcggaaccgcctgtcgctttcccggcgggtgcgatagccccagcaaactctgggggctattgagaaaccctcacgacattgccaaaaaggttcctctggagcgcttcaatgttgataatttctaccaccccgaggcaactcaccatggcaccacgaacgctaccaagtcctactttcttgaggagaacatcgctcagttcgatgcgccgttcttcaatatacaaccgatggagagcgatgctgttgatccgcagcaacgtctactcctagagactgtgtatgactccctgtgcaccgcgggtctgcccatggagaacctccgcggctcgtctacggctgtctacgttggtatgatgtgcgatgattggtccaccatggtggcgagcgatgtcgagaccttgccaacctatacggctaccggcttagctcgaagtattgtgtccaaccggatctcgtatgtctttgactggcatggcccttcgatgaccatcgatacggcatgctcgtcgagtcttgttgccgtgcaccacgccgtgcagaccttgcgtagtggtgaatcttccttggccatagccgctggaaccaacttgattctaagtcctagtgagtacagactcccgaattgaccgagttgccactgatctctcaagccatgtacgtaaccgagacgaacctgcgaatgttgtcgccgaatggacggtgcgcgatgtgggatcgggctgccgatggctatgctcgtggcgagggagtcgccgctgtagtcttaaagaccttgagccgagctctggccgatggagaccacatagagtgcatcattcgtgagactggagtgaatcaggatggtcgcactaccggactcaccatgccgagtaacaccgcgcaaacggcgttaatccgcgacacgtaccgccgagcggggctggacatcaatgaacctcacgatcgccctcaattcttccatgcccacggaactggcacccaggccggtgaccctcaagaagcggaggctgtctcggcagctctatttcccaatgactcgaaggaccacacagagctctttgtggggtcaatcaagactgtgattgggcacactgaaggctctgctggtctggcctctttgattgggtcctcactggctatgaagcatggaatcgtaccgcctaatcttcactttagcgaattgagcgacaaagtcgcgccgttttatacgaatctgaagatcccaacagagcccatgccttggccgaagctggctcccggtcaagtcaaacgggccagtatcaatagttttggtgaggcgatttctctcgatatcatgttacttgctaactcttgtaggttttggtggaaccaatgcccacgccatcatcgagagtctcgagcaagattccgaaagaacattgaagcttcgttcggtcgcaaatatcactccactggttttttctgcagcttccgaaaagagccttcggaatatgctcgccacgtattcagtctacctgtccgccaaccctacgttagatctccatgatctggccagtacgctcagcatgcgccgatcgacactaccctttcgaacttacgttccagtccgtagcaaggaagggctacccaagcagttgaagaccatggcggatgccgccccaaatgagtcggagctcagcgttcgccgctctcagatcattaacccagctattcttggcgtgttcaccgggcagggagcgcagtggccacggatgggagcgtgtctcatcgagacctcaattttcgcccaacagaaaattgcctggctcgactcaattcttcaaaccttacctgcagaggaccgcccgacctggacgatcaaggagcagctgcttgctggtagcgagacttcccgggtgacagaagcggcagtatcgcagcccctgtgccttgctattcaggtggtattggttgatatcctccacgctgcgggcgttacattcaaagctgtcgtgggccactcatccggtgagatcggagctgcgtacgctgcgggtctcctgtcggccgaggatgccgttaggatcgcatactaccgtggcctgcacgcaaaacatgcatcatcaccgaacggcgagaagggtgccatgatggctgttggcgcttcgcatgtagaagccctggacatgtgcgccgactcacgcttcaaaggccgcattcaggtcgcggcagtgaattctagctccagtattacaatttcaggtgacgaaggcactattgatgagctccttgaggtactcaaagccgagcagaggtttgcgaggaagctgaaggttgacaccgcctatcactcggcgcacatgctaccctgtgcagagccttacttggagtccatgaagtcgtgcggaatacagccagaagaccggacagggcctgtatggctttctagtgttaccgagggacagagaatggccaaggaaattctcactgaaagctactgggttgataacatgtgcaacacggtattattctctggcgcagtggctcaggctgttttggaggctgggccattcgacatgaccattgaaatcggtccgcacccggcactcaagggtccggtaacatcgacgcttgaggagtttggatgtgaagccccctacacaggtctgctatcccgagccaaaaacgatgttcacgaactatccgcaaacctcggtttcatctggatgcatcttgggtccggcagcattcagtttgacactgtcgacaagcttctatctgggttcaaaggaaacagggaagtcctcaccaacttgccgtcatatcccttcgaccatcagcgtgaatactggactgggtcccgcgtgtctaatcaccacaaatttcgtcgaacccctccaaacccactgctcgggacgcaatgttccgaagcgaacactgcccatgagattcaatggagaaatatccttcgcccgagcgagatctcttggctcagtgggcatcgtctgcagggtcaagtggttttcccagccacgggttacgtctctatggccattgaagcgacgaagcagctcactattcagaatcatattacttgcatcaagatttacgatctggaaataggtcgcgcaattgctttcggcgatgatgcagccagtatcgaggtcgtctttaatgcaagcgtggtcgagataaccgagaaagccatcaccgcccagttcgcttgttactcaatttccaatgccgatggaaatgcagtcctgaatgcgaaaggcaaggtcattgcagatttgggtagctctagtccagggacacttgcaagttacgagtccaaccctttcaatctggtcaatgttgacccaactgagttttaccggtacctcactaagattggctatgattactccgagcccttccaaggcgtgtcgcagattcaccgcaagcctggatatgctatcggtctgatcgaggaccagtctggcctctcatgggaggataatctcacatttcatccgggagtccttgatactgctctacaaaccgctttcgcggcatggtcctttcctggtgatggtcagatctggtcccttcatgttcccactcggtttgagtcgctagttttcaaccctcacttctcccctcttgccctaggcaaagaacgctccttcaaatacgaaacattcattcgcactaatacccaaggaagcctgactgccgatattcacttgtacaccgcagatggcaagaactcatgcatccagattgaaggtgcatcccttgttccattctcaccgggctctcctaaagacgatctgccactcttttcaagtttcaagatgagacctgctgttcctgatgggcaacttgcggcaatgggcgagacgatttcaccctacgaagcgcaggtttacaaggacattgatcgtgtcgctttctggtatatccgaaatgtggcccagactattaccccagaagagtgtgatcagattctgccccatttcagatactatctgcggtggtgtgagcgcatgattggcatggtctctcggggtgaacatcccaaggtccccgttgaatgtcttaatgatgagagaaaagacatcactgaagtgttgagcaagtaagttcatgacttttatttcaccccaattcttcttctgcgcaatctcgaatagattattgattgtcttgcattaggtatgagggccgcaaagatatccgatttgttgaggtggtcggcgaccaccttgttgaagtcgtccgcagtggcactagcatgctagagtatatgaaccaggatgggctgatgctcgcggtttacgaaaatggtctggcagccgggccaaacaaccgctggctgagtcgcatcgtcgcccaaattgcgcatcgctatccgggaatgcatattttcgagatcggtcagtcttgatgcttcatattacattagctttcagcgcacaagctgactttctgtaggagccggaacgggcgcatccaccaagacaattttgcccgaagtcggctcagcctttggaacgtatactttcactgacgtgtctagtggtttcttccctgaagctgaggagcgcttcaaggactatgccaaccgtatgatcttcaagacgttcaacactgagttcccgccaagcgatcagggattcactgaaggccagtacgatgtggttattgctgcaaatgttcttcatgtctcggccgacatggagcgatccatgacaaatgtccgccgactattgaaacccggtggttacttgattaccttagaggtgacaaattgtgaccttctcttcagcggtatgaccgtgggaactctcccaggttggtgggtggctgcggagactggacgaccgtggggtccttgcttgacgctgcctcagtgggactctgtactccggcaaacaggcttctcgggcattgatactatgacacccgatctcagtgtatctcttcccgtcgcggtctttgtttcccaggccattgatgatcgagttgctctccttcgagaccctctttcattgtcgaccgaggataatttgggcactctggtcatcatcggcggcacgacgctaccagtcttcggtattgtggaagatgttgtgactaatctatcctctatatttgctgaggtcatgctgtttgagactgttgaagagttggcaatctttggctccgcggtacctaatggggccagcattctctgtctaactgatctcgatgaaccatttatgaagacattgacgccgcagaagtttaccagcttacagaaaatgttcgacgtggcgggaaccttggtgttggtttctcgtggctgcagagcagatgaaccatattccatgatgcttgtgggcatcgggcggacagtcaagaccgaaaatccgaaaatcaaccttcaactacttgacattgaagccgttgaggacacaacggccaacatgctgtctgaagctctgcttagacaccatcttctgaggcaatggcagtctaggaaagaaccccttctctggtcctcagagccggaggttgttatgcaagacagacgcgcactcattccgaggctcttgcccagcacagacaagaatcagcgttacaactcccagagacgcgctataaccaaggaggtcgaccctagacaggcaaccatacagatgatccagaatggagtcacattcgacgtcaatgatgtttcgccactgctaatttccgatgcaccatcgtcgaaatccattacagttcgcagcattctttcctcattccagtctctcaaaattggaagcgccggtttcctccgtctcatctacggtgtgacttcttcgtctgagacagttgtcgccctttcatgctccactcagtccccagcagttgtaccatccaagtggtgtgtaccaattgcaggccatgctatgggtcatagcccatcatcactccttacaactttggctgccaatatcatggcgaaggaggttctgagctctgtgccggatggtggagttcttctgatacgggaggcagatgagcctttcaagtcttatcttttgcacatggcaaaagaattgagtgtcagaacggtttttgttaccagtcagggcaacacgggtacccctgacagcttctatatccaccccagactttcgcagcataaattgaagcagctccttcctgcagatgttgccgtctacgctgatctatcccagggggctggagcagatgatttatcagaactacttgataagtgtctcccatctcaatgcgtccatatcaaacgaagctctcttctcaataatgatatcactgatcctcatccccgtttttgtgacatgatcagtcaacttcttcagcaaacaattgaaacttccacgcattctgcaagaactatcaccattccgcttagcagagtgtccgatcattctgtgtttgagccttttaccgtggttgactggtcaattcaatccgttccggtcaaagttcagccaatcgattctggcatcatcttcaggccggatcgaacatacttcttcgttggtctagctggcgagctgggtcagtccttgtgccaatggatgatttctcatggagccaagtattttgtcttgagtagtcggtctccaaaggtcagcccgaattttattgaggggatggcgcagcagggagcgacagtcagaacattgccgttgtcagtaaatttgctccaacttttacctcaccgactaacaaaacccagagatattacaagccgaaggtccctttggtcctgctaccgagagatcagccgcaccatgcccgccgttggcggcgtcatcaacggtgccatgatcctccaagacagcgttttcgaaaacatgacccatgaacaattcctcaaagtgatcagaccaaaggtccaaggcaccatactcttggacgaactattctatgactcacccctagaattcttcatcgtcacttcctccatcaccgcagccatcggtttcagcggacagggtaactactcggcggcgaacacgttcatgacctctctcatgtaccagcgcaagaagaggggggttcctggctcctctatggacatcccggctgttcacggtattggatatgccgcccaagaggataactttgactttgagtatttcactacactcggctacaacaatgtttctgagcaagacttctgcacactttttgcagaggctattctctccggtcgcgccgactcccttgatgaggctgaggttgtatcaggtgttaattatgtgtcgcccgacttggatatcccccagactcacaccagagatatcaaattctcccattacatcctgaccgcggaagaaggatccagcgtcagcggtagcaagtccgccgcgcaggtgagggtacagttgcagggagtgacaagcgaagaggcaatctatgatattgtcaaaggtaagtcactgattattgaacactaccgacagcttgactgatttcataacagattccttcctggtgaatctcaaaaaagttctccagatctcagctgatgatgatattgatctttcaacgcctcttgtggagcaggggctggactcacttgtggctgtaatggttcgctcgtggtttttgaaagagatcgaggtcgatattccggttctgaagatccttgacggcagctctatttctgatcttcttcaactggccgtttccaagatacctacatctatcacttgtgcagaggacccgaaaagctacactgacactccaagcccatcgttaccaacacctgccaaacccgtcttcaatagtaccatttctggaacacctagcgactctacacccagctactcaccactgctgacacctagtgaaagcgagacatcatccattgagctgctgactccagatgagccccttaaatccaaggaactaggggccacagataaactggcccgatcgcaacgggacttggtcattcagcattcccgcctcacgagagagcccatgtcctttgggcaagccagattctggttcctccatcatttcttgaagagcaaaacgtccttcaacttttcgacttctgcacgtctggtgggcccgctgcgagtgacggcctttgagcgagctttggacacagtgattcagcgacacgaaggtctacgtactagattcctctggttggatggggatattggcacacctatgcaggagattatctctcaccctctgcttaaattggagaccaagcgcatatactccgatgctgaggcagccgacgaactagagaggttgcaaaatcacgaatatgatctggaagactgggggtctatcagagcaatgcttcttattttttccgacaccgtccactacttcctccttggatgtcatcatattgccttggatggacaaagtatgcacattcttttctcggagctcgacggtttgtataacggtaaagctgttcctcgaatccccgatgcctcgcaataccgaaagtttgctaccagacagaaacaagattacgaatctgggctattgcaggctgacatcgatttcttccgtgacatcgtccgtgaggatccgggtgcgattgagccgttctcgttctcgcacctctcaaagcggaagattctagatacctaccggtgagttgacaatgaaatcgggttgattattttctgacattgttctaggcaccatcgcgcgtcgacccggctgggagccgggttagctcgcaaggtcaagcaaattgcccgcaagcttcagagcacgaattttcatttctacctgactattcttcaagcgctcgtattccgcctacttccctataccaaccaattctttgtcggaattgcggacgcgaaccgagtggataaagattcaatcaacacgatcggttgcctcgtgaatctactgccgctcaagttcaaccgggcggactcatccaaactcgatcatgccgtcaaactcacacggagcaaggtgtactctgctctccagcactcgcgagtgccattcgatgttcttgtcaatgagctcgagatcaaccgttccgccatgcacaccccaatcttccaaatcttcatggactaccggctaggcgaccacgagaactcgcggctagtcggttgcgatgccgagctttcgtggaataatgctgctacagggtatgatttgcacctggaggtgcttgatactgtcgatgaagagtcgctcgttgttttgaaagtgcaagagggtctctattccaaggaagcagcggacttgctgcttcgtgctttcaccaatctcctagaacaggccacacaaagtcctgccgatcgtatcgatctatcgtcgcctctgctgtggtctagaaaggatattgatgatgcgttagcgttgggaaagggtatgtcacacttcgaaatcagggagattacgactaatcctcctctataggtccggaactgaaccctgaatggccatcgacggtcgcacaccgcgttgatgagatggtggatgcacaccctgatgtcatagctatcaaggatggacatggacatgccctcacctatagtgccatggccgaccgcgttaacacgatcgctgctaccctccttgaatatgtctctggtggcgatagtgttgccgtgttccaagagccaagcgctgactggatctgttcgctactcgccatcttccgtgttggggcggcgtatgtccccttggatctgaagaatggtctgcaacggcttgcgggtgctgttgaagttgccagcccgcgggttatcctccacgataaattcacagaggctcgagtgccggatcttcgggtggcaagggcagctatcgtcaatgtctccgatattgacatgaaccccgatgccaaagtaccgaacagggccatggcagagtccactgcggctattctgttcactagcgggtcgacgggtgttcccaagggcatcgtactaccgcattcttgcttcgcgacgcatgtcgaagctgtcgaaaaagcctggggcgtgggcgcggcggtagtcctccaacaaattgccctcagttttgacttttccttgcatcagatcttcacggcccttgccaacgggggaaccctctttgtggtcccgtacgagaaacgcggagacccgtatgaaatcaccaagatcatgaagcaagaaggagtcacccacaccctggccaccccaaccgaatatggtatgtggttcgatgcaggggcggacattctctcccagtgctcttcctggaaatgggctcttgtcggtggcgaagccttgccaaagtcaattgttcgacgcttccgggatttgaactcgagtaatctcaagctcttcgatttctatggacctgtagaggccactattgcacttaccaaaggcgaggtcaatttcgggctcgctgatactgaacaaccaattccggttggaaggcttcttcccaactactctgtctacattctagacgaagcgctgcagcctctcccgatcggtgtcccgggggagattgttgttggcggacccggagtggcggcaggttaccttggccaagaagagctcacaaacgagaagtttatccccgtccctagctacttgcaggacgaacgctccaagaagcttggatggaacagattatatcggaccggtgaccgtggacgcctgaacaacgacggcactctcatatatgagggtcggatcaacggtgacgatcagatcaagcttcgtggcattcgcattgagctgggggagatcgaaaatgctattatcgaggtcgcgaacggcaaagtctctcaggcggttgttgctgtccatggcgaagaggctgacaaatttttggtggcttatgttgtcctttcatcgcatggtgaaaagtccggtgacaatcttttcacagccatcaaagcagcactcccccttcccagctatatgcgaccttcgctattcattcccattcacagtgtcccgatgaacgtgcatggaaagactgatcgcaaggctctttacaatattcctttgccggatatcgtgacttcgggtccctctgagcgaggtctgatgaatttccaagaaaagaaactctgtggattatgggaagagatcttgccagcatatggtgccgtaatcagctcagggacagacttcttccatgttggaggaaactcgctgttgcttgtcaaacttcaacgccgcctcaaggaagcctttgcgttttctccacgactcgctgatctcatgaactctagtacattgagcgatatggcccgccttctagaggacacggatgcgagtgtggtcgattgggaggctgaaacatctgtgccggcatcatgggctgatctcgcacagagtgccacgccgtctgccccaaatgacagaatgacggtccttttgacgggcgcaactggttatatcggccgtcatctcctctactctcttcttgaaagcacccgtgtgtccagaatcatctgccttgtccgtgacaaaagcaagctagtcacagaatctgagaaagtcgtggcaatctcctgcgctttcgacaagcccaatcttgggctcacctccgatgagcttagctatctgactcacaatgccgacatcgtggtgcattgtgctgccaatcgatccttctgggatgactaccaggcactgagagccgtgaacttctattccgtccgtgacatcgcccgtctgtgtcttccgcgccgcttgccgcttcacttcttttcttccggcgctgtcgccgaccaagcggatctcgcggattcacacgatggctatttgacaagcaaatgggcagccgaaaagttccttcacaatgtatctcaggagtttggtttgccggtgcatatccacagtccaagcgcagcaactgcagacacgccgtacacagtcgactccatcgtccaacaagactttatcgaatgtgcacagcgtgtcggtgcacggcccgatctcgagggtacgtccggccatatggatctcagtcagacgaccggcttcatcgcgacagcatcggaggccattcttaacgggcgtgaagacatcgataacaatgctcccatactcaggagggtggtatataaccccacccaacggttcgatatccagcgctccacttcttctatcggtgctgatcccagatgggcgtcactgccgacgatggatatgctgcagtggatggggaaggcaaagcagaatgggttcccgtatgtgctgacggcccagcatattgtgatcggttcgaagacgggacaggtggtatctaggcgataggtcttgcagacatgacgctgaaattgtgtatacattagatgcatttattttcttcttctatgattctttttcccacacaatccagtacatacgaccatagggtgtggaaaacagggcttcccgtccgctcagccgtacttaagcnnnnnnnnnnnnnnnnnnnnnnnnnnnnnnnnnnnnnnnnnnnnnnnnnnnnnnnnnnnnnnnnnnnnnnnnnnnnnnnnnnnnnnnnnnnnnnnnnnnnnnnnnnnnnnnnnnnnnnnnnnnnnnnnnnnnnnnnnnnnnnnnnnnnnnnnnnnnnnnnnnnnnnnnnnnnnnnnnnnnnnnnnnnnnnnnnnnnnnnnnnnnnnnnnnnnnnnnnnnnnnnnnnnnnnnnnnnnnnnnnnnnnnnnnnnnnnnnnnnnnnnnnnnnnnnnnnnnnnnnnnnnnnnnnnnnnnnnnnnnnnnnnnnnnnnnnnnnnnnnnnnnnnnnnnnnnnnnnnnnnnnnncgccggtgagttagtagttgggtgggtgaccaccagcgaatcctcactgttgtatgtttttgtttttattatttgttgagtacggagtatagcaatagcatgttcatcttaggccctgtggtggacctctatgaatgactttttttggaaatgaagcttaacgagacctgagagcagaaggtaggtgggctcaagggtggaggaaaagtagaaactgacatgagagcacttgatatatctatctgacgctatgaccatcaaggggggcagaggtcacctgacccaatagtgataagccttcttaccatcccatctacggctatagtctatagttctcagttattatatattcccctccagtgctataccaaatacatacgaccatagggtgtggaaaatagggcttcccgtccgctcagccgtactcaagccacacgccggtgagttagtagttgggtgggtgaccaccagcgaatcctcactgttgtatgtttttttatttattggcaaaggttacatacatacaaatagaaaggtgcccaggtgatctgcacacaacaatcaaacaatccttttcccgtcgtctacctggaaaactcgagaactggggagaaaagacatccgaaaagacatccaaaaagacttactactagacagtaccaagatgacagacaaggccgcataagcggcctatcattcttgtttggtactgggtcaagattatattcagttcgtgaggcgtctctctatcgcttattttcttttatcctcactgccaaaaaaaacacaagaagaagccaactcaaaaccatccctgcatatggagcgtacatcttcagctattaggcgtaaaagacacagatagattgtctgtatagatggttacgtatgttaaatctgtactaatatatcccgttttcatttagtttgtgaaagtcgatttctacgtttatagtacgcaagatagctgcttaagtattagtcttgagcaggcgagggtataatcggcacctccatgagaggtcaactataatatgcggaaatcttgagattgggtgctatgtttctgttgctgatggatgtttgtctttattagagtatagagaacgcagttgcctcccgtcatagagattatcaacacaaaccatatatcaagtcatcaattatcggcagactccaaaatgctcgccgccttgtctatctcatcaatgtcattgacaaactgcagggctattgggagacctgatttttgagcaatgtccctaagacgcttcatgacccattttcgggtgcggcctcttgtgactggggattttccaaccgtgtataagcaccacattagtagatgcccacccgaagcacttccgttggcagatggatcggaagacaaatcggcagaagtaggagactccgctggggacaacacagctcccaaggactgcggaactgtggccaaaatatcgtcacccagagttttgaggattcgacatgtcttttcaagggttgtcgctatttccttttggcgggccggtgggagacccgcagtgagggctttcgacaaaaggtggaattcaatctcgcagataatgacttgaaggatacgagaattgttccaaagtcttatagcccacgcggatctgtagaggtcatatcgagaattgtaaatgaggtctgggtctccactgtgatcttcaatcgttgcatacggttcttgcgtcctaaaattaccaagaacgtcttgaaagtcacgttgaaggatagcagattcttccaggaagtatgctaaagttgcaccatctttgattttggtcaccgtaacatccgacagaagattgacagtccgcgtggccagcacgcctagtagccaaaggcaactggagttgtcggcctgcttgcttgcctcttcttgcaactcaagcatatctcgtggaaatggctcaaggcgatgaacacaggcagcgcacatatctgcacgcacttgattgaacatgggaatagaggctggacttgagaattggctcttgccacgtgaaaccaccagcgccacggtcccttttatatattggaaccatgtttcaaaattgctcacatgctcgaacaagccaagagagatgactgacattaacgtactatccttgatagattcgacaggagaactgagcgctgcgttcactttgtctatcgcttcccagtattttgtgcgggcccgctgggacaattcaggctgttgagtggagtttgccagggctgcaagacccacagctgccatgctggcaatcaaggtcggattctcaccatcagcgctaaacactgccggcacatagtccagataccctcgagagggagaaagaccaccaacgacgaaatgaaatagaaaatagttgacgcccacctcgtccgagctgagactcagagtgcgggatgggggcgatcttttcaatgtttccaagccatctgcctttgcccgagcgtctttggagcgcttaattgtgtgggtggtttgatcgcggaagaccagctcccattcatctctatacccttgacattcctcgtgcgcacgaatgcactgtccacaatggggaaacttctggtcgcactttacaaaaatactcagtactcagcattgagcgagtcctatccgacagtagattgatcccaggcacttacccttcgcttgatagatcggcagttgccgcaatttttggaacgtcgtccactcgctggcataattatgattcagaagagaagggagtacgcataagatgaaaaatgagcacttggcaagttctcttggcggttggaaagaagaaacaagctatgacattgttgactctttttaaggtacaaactacgcggctaccccgctgggctgagagctgaaggctcagactcagccgtgcgctaccccttttgcgccaagatctgcaaatcatacagctaagctaacacatgagaagtgtccaattcccccccctatttctccgaggtcgagaatttgtcgtttattcatgcggaaagagatgatgaatgtagcatttaataaccagcgaaactgcgtggtgttcaactcttgaaaacaagagaatagaagagatggagagtccaaatacacggtcagatacagtactaaaccgtttgatacagggtaatttaccccgaatctgatcagcggggaaatatcggggaatggaccgcagaattacttctcttagccactttatgtgaactatgttaccgaaatattagtgatacttcgacgattgacttagtttcgcttcttacaacacaatggccttttcagtcttaacaaattcagtatcattatggaagcgaacttcctcctatacacaacgtgacggctttctttttctcttcgttcttcaatttcatcctcaaagccactcttcacgcccaaaagacccatccttcaaacagaaaaacgaaactcacacgcccattggtttcggctcgatatcttgctgggggactggagtaagcttcacgaagtcgctttccagaatggctgatattcccaaggccatggtcattcccatggcaatgatttcctccaatacatccatgcacagatagaccgtggtatttccatccagtgcaaaggcactaagcgttgtgtaatcgctgagcgccgagtagacgaggcgaaccgccaacaagggagtagaaagagcaatggccaggaacaacttcttttggaatctccgcatagagaagctcagctcatagaaaagccaaagactgaggagaacaaagatgacgaatacagccaggaaaattcccatggctacttttgcgagcttgccagggtggtaagttccgtcgttgccgttggaggagctgactccagcgataccgagaatgagagcgatgatggtgaccagagtcagcaatgccatgggcctcggaggcattcttctatccacatcactataaagacacacgttagtctctgatcggcgcgatgaatactttcgcagtgaaaaactcacatttgtctcagcagtccgataaaagttagtaagagaggtgcaataccaatcatttggcacactgccaccgcgactttgatgttgtaggaatcattgctgattgccagcagcgaggatatacttccagcgatccggatgagagaaagggtgacggcgtaccgccaaatcttgctcccttgcctccaacctgtcctcttccagatgaagatggcagcaacgagaatgatgggaaacacgatcagctggaggatagcgatgccgtttcgatagctaacagcagccatgttgctttaaattaatggtaggacaaagaaaaggacgtcgtcgaggtaatttgaagtgtggtcaggaatgcaaacccgtttcttgagtggtttttgtaacacagatatctggtatcctttatacttcgaattgtccttcaatttgatgttgattcagcccggcgatcttactgccagcgtcaccgatcgtgattaaacgttccttattgactggtctaacatctatattacccgaataggaagattcttgctgatctcagcgtgtcagtggcttgggtcctaagcctcgccaagattggggccgaaatgatctgattatatcttagctatatctcctccagggccgatccctctcgagccaaagcgtaatatactacagtagcggtgattttttttacactgccccgcagcatcgaagatgcccaattcgggggagcgcccgaaagcttgttctgcttgtgcgcccggtatatcttataacacagtcaatcatattgcgggccgctgtgacaataagagaaagggccatttttgttgtcgattgacaatgtattgattatcaatatttcatccagcagtgacgtgtaaggcgctattgatgcagcctttgactgcagcatggaagaagcgggctgaatgaaatgcaaacgaaatttgcaaagatacagcagcctccatcggaaatgccgtgagaggctgagagaaaattatttgttattgctccgtgcggggtaccgatgaattgatcaccatgatctacacgtttacttgtccgagtatcgtgaggttgaacaaagaacttgggattcccgatccatagcgctagtccactttggggaatcgagatgcagcaccaatcacagcgctctcgaccccgttcgtgttgcaaagccaattgaccaaagaaagagtactagtctaatcaggcctacaacgggtgatagataggaatgaatggaacgttaattttctaaccgagtaacagtctaaagtgaatatacggtcagatacaatcctaaaccatcggatacaggtcgtccgcggttggttttgctctcacgggccctataccctagtagcaactctagggcacctacactatagttggcgcactatggtttctcggtccctgattggtttgactcgagatattgacagatatcaagctcgtggtggctctgcgccccaaggggccacacgtggtagatccatcgatcagatcagccaagtcacaccgtgatgtaagagcattggcccggatccatcgaattctctttctacttcttcatcaccaccacagcccatcggtgcagttgtcgagatggaccttttcatctaaaaccttgggctagtctacgacttgatttcgacacaaggtagaacatttctatgcagagcattttaaagcgtgtcctggtcaccttgacatttcatccttctacgcctaagtcctttagcccaactccaataaaggatctcagttaagtcctctttcctcttgcacagctttatcttgtctcaatcatcgtatatattattcttctcatatgaagctccactaccagaatcccctgaataagttactaattctacacgagctcggattttctccactgtccctgcgggaagccaatagaccctctacgggctctcaagaagcttcagcttactgcggctaaaactggatgagagactggtaatcaaaacaagctcaatatattaaccgtgagatgccagatctgagctactcgtagcagtagtaggcactacgcacgtttcaatgtcagccttcgattcgccgataaaatgcaaaaagaaacttactccgagggacccttccagccaacacatttccagcagtcaaagaagtgggtaggatcgtacttcttctttatccgaagcaactcgggataattcgatccgaaaaaggtctcttgccatttcggctccaagtaatggccttcattcaaatagcaccctccaccaggcgtcaaacgtttcagtggctcgacagtatccaaccatgcctcgagcagatttgtctcgttttggacaccaagttcactcgtccatccacctgtcatgagagtatgccagagagctgggcgccaggcaggattggcacttgtcgtgttgccattttggtgatttacaggcgtggtcatgatgatttgggtgagggaatcacctgcggggagcagcttattgctgagccgaactccttgaaggacggcatcgactaggtctgcgactttgcgtttgctctcaaataatgagcgcgggatcagtcgacctgcaacagcttcaaagattccgcccggtgtgtattcggcagcgatcccatcggtaatctgtaagaattcggtatatttgggatatgtcgtgtaattgctcttggtgacctggatatttgtttgattcgccaaaaaggaggaaaatcccctggtcagagttttcaaagccgtttcgttgttcgaaggcaggacaagataaatttcagctttggttggccagtagtaagcatgtcctgagatgttgttatgagaccaggtaggttggtaggttgcgtgttgcgtgagaacctgtttcaatgcagcgtaattggcagtttcattcccgtgtgtcgtgaagctgccctcgaattgatacacgttgattttgaccgctggatggagttgaaagcgatagcttgtcaaaatgccgaaggagcctccgcctccgcctcgcatggcccagaagagctcgggatcattgcatttattgattactcgcaatttgccgtctgcagttacgacctcgaattcaaccgcattatccaccatcagaccatacttgggaccaaagacgccgtggccacctccttgaccaaagccgccagccaggccaaccgacccttcattgccaccggtaacatccatgttgaactttgtgaaataggtgtagacgtccgtcgcctgagcaccggatcctatctctgcgatatgttgaccgttcgaggcaggacaattggatgcagtaaagtttttgtgatacttcatattgttcatattgtgagtccagattgcaagagtgtcaggactagtagagcgtccaaagtagtcatgtcctgtgttcttgatcgtgatccgaagatgatgttttcgggcgaatttcacagcggtaacaacatggcttggtttcctagcatcgacatacaatgatgatagtcggccaaggtagcaattgtcggaaatgacctcagccggattcaaagcattcagggcacatgtttgggaccggcatccttcccagttgagtcctgttgctgcgccgtatacgtcggttcgtgcttggtttgttgaatagttcgatttgacgatatcacaggctgaagggtcatagtattgagaactataatagcagcttgcggcaaaggggaccgtgcggtgcaggtttccggacagactgctgttgaaactctcccattctttgttcgatggccaacaaggctgtccggccttacaattgtaccctggggacgttgctgatgtggtggagataaggccaaagaccgccaatacagatgcggcgttcaccaaaggggcaaacaataattgtaccatgattgaaaaccggtcgtaggaaaggaaggaattgggaaggaatagttgtgatttcatgagatgctagcacaggtgtcgcattcaagtattatttatagttaccggatagcccatgagatcgtcacagcccccaatgttgatattttcccggccagcacacgagtaagctagtgatacttaatttaccaaaattgtttagatccctcaattctagtcgtatccactatgtagcagcacattgtccagtggggtccacgcgtttgtttctagagtaggtctgaatgagagcgtcggattggttgacaagagacccatagagctaaacttattttagaaagcgaaatgcagaaccaatcaacacctgaaaagataaatggtgatcatccaaacttttgttgacggcgtccagcggtctgtgttcttagagagttcaaatttagtaataattacgtagcattactagtctagctgtgtagataatccaataggaatatttttgggatttccccccaagtaggggtaagctgaacggttatgcccgaaaggatgcatttgctctggctgctgcaacgtcgctgccgtcatcgtttttgttagaacgtatagcagtgcatcctatataccctgataggagtagcttgaaagctagagtacgttaagggggctatatcatgatctcccgaaaagaagcaatatagtctcggacaatatgcgcagcatgggctggagcgttctcttgttagaaaattgatggatcgtcgagtaatgttggtggaaagacggccgtttctggcgccaaaagttgtcattttcggcgtcattttcacaggttctcatattctaggtgtacagtggttttgtcgggcttggtctatcactcgatatatattccacttcttttatttaattctccaaaaacgctctactgcatttcgctattgattttatggctgcacaacagtccatacctgtggaattcagccatccacttttccagtggcgcagagctctacctaaaatgttatattgctgttttagattctaacgtttgacaccaagcatgtgtgcctactagtcatattcattatctcagcagatctgaaggtggagaataatctggtttggattgaggatccttcggtcctgcaagattttgcgcgtgcatctctcggaaacccactgcgcgacgatattgaagggcatcatcccctagaaataatagaatactatatgagcgaagcaaatgtaaagtaatctcaaataacgactcacatggtccgcggtcaaaatcaatcgataccattccatgatcagcttgatctcgacctgtcgatggcccaatggcaaaatgaggctgtttggcatgagtgctatcgctctgtatttattggacatggtggtcacctgaccatcagcccggcaggcaccaacccccataactagatagtcgggcattctgcccttcaggaattgacaactctctccctctttcatcgcatcactacactgcagtcacatcagtattaaaacacattctttttgatggtcggtgtcacatgagtaggaaaggctcccgtatttggtggaggaagtagataaccaagatgtttggtatcctgcgattgctttcacaatttcaaatctatcttcgatgcccatcttgtcccaggcatgacctagctggatacgcccaaccttttccatgatgatgtattcggcaccaacagcgttctcgcctgctttcgaactccaggctagaacacatggagcaggagtacccaaaatattgcgaaccttacgaagattagtgatcatcaaagagcaggtagccacacagtcaaggacgccttacaaattccattgtggcgacctcacttgctgtcgtaaaatgaggctgtccagcattggggtttggcacctttccgaccacttcagcgccatttgccatggtgaataggaatgttttgttaaacatgccatcggggaatttttcgatatgagcatattcccttgagccaacagaatcagcggcaagcctcgcaagctcattcatatcaaacttcacccgacgtattgacagttcatgatcttcatttgacacatttagtccccttgtgtattcgaagaaatcgttaaccgagttccaattcttggaaagacatgacctcttcaaggacctggctgattgtgtaaagagcctgtgcataacggtgaaaacgaatggctatgctgcggttgcgaagatagtacaatacatggaaggtttaagcaagttcacgcgctaggtgtggcctacgccttaaacccgttcaaaacataatgtcgaattttgtacagcgtaatttaccactaggccataacaaaaaaattaaggttcctgtttagggcctagaggggccatatcccattcttgacacataagcaacgcgcgtccagcctcttcgcgtggcaataccttatcaatccattccaaccttgcaaggttcgattgagctgcttactaatgatagaggtgagcgccgggtgagaacgagggtcgctcagacgccttggagagaggggtacgatactcctagtggccttgtctttgccatgttagtttgggtactttatattaccagaggttgaaagtacatacatcaagcggttccatagctcagttggttagagcgctgtgctaataacgcagatgtcgagggttcgaccccctctgggaccattcttttttgttttttgtttttcgataaatcttatcagaatgtgatagttatggctcatttaagccttaaacaggaacattggtttttgttatagtctagtggaaaatatgctgcacgattttccgtcaaatcctcttctatcagtatccatcattgctttttgcttttacaaagctgtaataggctttaaggtagcagtattaggactacgtagccggactgaaatctacccagtgggcctgactctgagcgccctcataaaagcggcagcatctcacccgacagaggaaatatgtacgtacaacatggagtcacctaggtggtttataaagtcttcttatcgggcttagtctgtcactcaatgccttcaccatattgtgtcagtgcgagggcacgccatgttccacctaattttatcttattttctgactctgtgtatgttgtagttagaagaaagctgattatatatagtaatagtccgtggtagagaaataccctccgtgtcaatagactatctgacacatttctaatattgcgacatgatggcgtgttatcagtaacgtgctactagatagatatcactaagccacctatttccccgcagctataatatctaacagtaatccccattttcccgctcatcctcagcaacaaaatgggtagcataacagcaactacgttccaagatccttttcaaaaagtcccaacgggccgaactggtaaataatacgattgacacatccatcatcatccatgaacccgaattaagaacgcacatctagatggcctcgcagctctcgttgggaagttccgagaggataccgatcccaacagaactgatctccttgtgggagtgtataaaacggaggagggaaagccgtacgtgttgccgagtgtgaaagaggtatatataacgtctgaaagttcacctttccaccctcagcagatcactaaatttttgatattcgttacaggcaaagaacagaatcttcaatgatcctgattggcatcatgagtatcgcctttccgctctaggttcccagctttatagggacttgagcgccaatttgctttttgggcctgaccatcgtcttttgcgggagaaaaggtaaacggagaccgatatgctttctcaaaaacgatcgagggctgactttcccgctcaggatagtttcaacccagactctcggcgcaagtggcggatgccatgtcggcgcagtgctgttgaaaaatcattatggaccgtggaaggagaatggaaaccccgagattttccttccgagcgactcctggtgtaagttgtcgctagtgacattatacgaaggcaattctgaccgggtcatagtgaatcatcctttcgtattcacgtctgcgggaattaaggctagtcttctgccttattttagcagcaagacaaacaatttcgattttgagaggttttcagaggccatcagatcgttgccagctcaatccgtcgtgcttctccagtccggtgcccagaatccaactggatgtgatccatcaccggatcagtggcgagagttggcctcgatcttctcccagcgcggtcatttggcattcttcgatgctgcatatcccggatttgcctcgggagacattgatacggatcttgccggtgttcgtttgtttgccgagcaagaaatcccgcttgttttcgtctcaacatacggcaaatccttcgggctttacagcgagcgcgttggaattctctcgattcttgttccaagcgaagaagtggggaagaacatagaaacgcaattgagactactcgcacgagcggagtccggcgcaccgcccgatttcgggtccaagattgttgaaacaattctctcggatgagactttggagcgccaatggcggcaggaagtgcgcgatatggcgaacgaactcaagcgccgtcgagttgcgctaagggaaggattggagaaattggaaacaccaggtagctggcggcatctcactgatcagaacggaatgttttcgtaggtgttaccaatatcggacctagggagactcaagatactgaccttctttagatatgttggactgtccgtggaacaagtcactattctccgagagaagcaccatgtttatcttcaggactctgggagaatatctatcgcgtatgtttgatcggcatattttgtgaataggcggtgagctgacatttctttttcttagtgggctcaacgacttcaatatcgattacactgctcgcagcatcagtgctgtcgtcaaagctacgacttaaattaacttgaaacgggttgtctcatcgattgcacaattcagacagggaggattcgactcgagggcatgatattcgcgtctgagttacatatgaattaggacaaacatgaagtaagagaaaggaggaatcaacaaccatatctatccataaaagctctgaacgaggggacctgcagaagttgtattgccgtcagaagtttctctgggcagtaaataaatactttggacatgatcgcattcacatgttgtcgctcaattgagtcaatatctggacgaaagcgtgtaatgattgaatcgagggcatactcttgattaggcattggatcttgatcataccaggaatcacgacctgggcactataccaaagtcaccgagaaagaattcctcagtccgtaggctttcgggggccttcacagctcaaacaagccccccccccctgcttccaaagctcgataaatggtatgatttgctttagtggccataatttagcgtgtcatatatgaatataaggttctgctttcttgttttgacgttaattctaaagtggccataagaatcaacccaagatggtcgtcccatggtactcgaggttatcgtcaatatagaagtggatatacgaacctagtgtggtcaagaccgactgtaggtggtgcagtcatatcaatttgacatataatgtaagagacttcaaactatgagggagggtatcgtcacaaatatttaatatcgctacattttctatgaaaacaccaatttcgagcttttccaatctgtttatctaccaagtccagcattgtgcactctaaggcaggctgtattgcaatgcggatccagttgctgtgatatgaatattcggtcttgatttgcaacagaggagtgccaattctatgcagtgatgattcaatagagcttatgtacgttagacgccgaggaatagtgcggtaggagtagatatttccatgtcttcagcttcaatgacaagagagtcactacatatgcactttgatactctctgttttgtagtaatattatgttatctgacaagtgatgagggtctaatagctccttctgtatcatgacctttgtttgcccgaattttgttgcagctgtcacaaacagcccagaacttccaccagtcctaatttcgcccccaggcaattttatcaatcaaacttcccttcttgttttatcaatactgtgttttcacccattcactcccaaccctccttttgtcaacatcatcacaaagatggcttccgttagctttgccgagccgtcttttgtcgaacttgttccagcacttgttggagagtctaatttctctacgtggactacttcactcaagtggaccctcgactcgcgcgacactcgttattacgcgcttctcaccggcgcgtggagtgaacccagcgcagttgaccccacacagcctaccccggctgaagtcgaggatcgtacccagtgggatacagccagtcgttacctccttccgctactgaatgccactgtccaccacacggccaagttctatattctcgatgccaataacgcgcgtaccgcatatgccaacctccaccgcgcgttcgcagcccggtcttacgaagctggtttcgccaatttcctcaagtttatcaacaccacatacacttcaaacagacctcaagctttcgtcaatgagtggcgtctcgccctcggcgagctccaagagtgcaattcgacaaagctcacgcctctcctcatcttttaccatttcttgaacgctgtgagcaccaacccagctgcgcatgagtggctcgacggcttcctcagttcgaaagtctccaccgatacaaccatcgagtcaaccttcacagactttgtcgtttttgaggaacgtcgcctccacgctctcaatcaagctcattcatttagcttgaacaaagggaatcacctgccatacttttgccagtttcatcaacgtcaagccggtcattccagtgcgaactgcttccgcaacccggcttacttagctctggacaaatcagctccagctcccactcccgctcccgctcccgctccccgtgcagtcactgaagacccacctgtggagtagagcagcatctcaccaactaggggctgtgtttgtgggtggtttgccacaattgttcatggggaggtgttcggattggatggttccgtgaaatttgagtcttagcaacaatcaactcttcgcatgttaccatgcacattgatatcgtccttcctgtaggcgtctctcgacatgcaaataagaaatagtttagtatgacaaggctttggccaatgtcggagcaaaataaaaagactaaataaaaataaaaatatctggactcgcggggaatcgaaccccggaccactcccatgctaagggagtattataccactaaaccacaagcccagttgattggtggattgaatccaatagtgaaatgagagctttaacctttaagcacacattacacagcacctcacatatcgttcagttttcacctggttccattgaagtgcagccaccatcctatttgttattcacctacccatccatcaacatggagaatactttggatggaaatagaaagagatgtgacattgatggctttgttcaagtgcctcaatctgttttgttccaaccacacccttgtatacagactttaactgcagtgtatctgttggactgaaagatttctagtagctgattttccaggacatcaacacccatctcatcgtttgcccagtggaatgccatgaccatacctctggtagatggtctgtgcctgatggcgtcattgatagatctattcaggctcgcagcgagctcgaggctgatggccggcgggatttctcatagatggaacattgtggattccttgccattatcattttgtatgactgactgtaaagaaatacgtgtaatctatgtctgtcccgatttactgatctttgtcatgttggtccttgcgcaggtgctttgaagtttagtgaattcgtcaaatctgataccatattatattatttacactcaatttgcaactatcctctaattggatgcggcgagcgcctgcctattcgcgagacttcctgatgccctaaacaaagccggattcctgaggaagttctcgtgcgctctgaactcccccttcggtttcttcggttccctcatcatggggtctctgccataaccaccaccaccaggggtgttgacaatgatgcgatctcccgcacgcatatcagccgatgatttgccgctcatgccaatatggcgcacctccccagtgataggatcatgtctgacccatatattaacaccgcgcatgccttcacacccaccagcaaggccatagggtgcattgacacgtctttctgagagaatcgagacctggacggggatgcggaactcaatgtcgcgaacgcagccatcacctccacgatgcaacccggctccaccactgcccttccgaatggagaattctcgaaggatcactggatactgtctctcgaaaatctcggggtcaccaatgcgggtatttgtgacacctgtgtgcacaccactctcgccttcccagtcggcgccggctcccgctcctccggcaatcgtctcatagtatccgaatcccttgagaatctcgccggtcacggcatctttgcctccgtacccgaaggtcaggttgttacatgttccctgcgatgcagcggctgtgtggaacgccttgaagatgaggtcgatgacgcggtttgtcgtctcgcctgtcgacccgactgttgctgctgtgaaggatggtgtcaggagtgtgcccttcgggcagacaatattgatgggttgcagacagccctggttgagtggtatgtcggaggagatcatgcaacggaggcagtactgggtcagtgttagtagtgtccgcaagctgtcatgaaaatttgacacgggggaggaagaaagaaagagggagaaggtgtgtgaagacttacaagaatggcagagtacatgcaggctggcgggcagttgagattaccgtggtgctcaggtccggtgcctgtaaaatcgaaaatggcctctccggtctccgaattgatggaaatacgcagtaccaatggcgtaccgtcgtcggtgtagtcgatggcctcaaggtcggcaccctcaaaccgttccgagaagaccttgagcagctcccgcaccgactgagaagcgttttcttgaatcgcattcatataaaactcgacgacaggccaagtatactcattaacaagtgagcgaatgagttgaatgcccctctgattggacgccacagcggccttcaggtcggcgatattgtctttgagggtacgtgtgccgctgcagccgggatacttagcgggctcgttgtacaatatgtcgatcagcccttcctcatcaaaaacaccctctttgatcatcttgaacgactcgaacgacgctccctcctgccataactccgtcgagttgggcggcattgacccggggatgataccgccgatgtcagcatgatggccacgattgcccacatagaagagaatctttgtcgggttttcgtcgttgtcaaacacgggcgtgatgcaagtgatatccggcagatgagttccacccgctatcggatggttactcaggatcacatcaccaggcttgagctcgcctggcttgtaccgcttggcttggtatgcgattgccgaggccatggatccgagatgacccgggatatgaggtgcgttggcgacaagacctccactggcactgaagacggcacaagagtagtcaagtcgctccttgatatttaccgagatggatgtcttttgcattgcgttgcccatttgctcggccacactcatcagccgatggctaaagacgctgagaagaattggatcgatggcctccgtactagcaggcttacgctcgctatcagtgatctcgagaatgatgtgctcggggagcttgatagccttgctgttgctgtcgaccacaattgtctgagtcttgtcgatgatcatggctgggccatggacccgagcaccggtcggcagctgggtaaggtcatacacgggagtatcgacccacccctcgttctcgaaatagacctttgaaatggactgctcgctaaactcaggggaagacaacgactcgagcttcaggagctcagcgaaagggtttgaggtgtggacgtctttagccttgccaacactgcgaacacggacgtcatcgaccaggatatcgcgctgctgggagaagccaaattcctgctcgtgtcgacgggtaaatgctgctccaaattctgcaagatcatctggttgtcggatcatcaacatcgtgtcacttccccggtaccgcatgtttagatacatctcatgctcaatggactccaggccgaaaccttgggcagctaggccttgctcgccttgtgaccgaagcttcttgaagcgagactctacccttggcataatatcagggtggtaaatcagggactcgggctcttggttttcgacagtcacgtcggcaagagccataccgtatgcagagaggatgctggagtaccgcggaatgatggcgcgacgaataccgagatctcgggccacgaagactgcgtgttggccaccagcaccaccgaagcaagccaggttgtggttggcagtctcatagccacgtccttcacttagagtccggattggtcgtgtcatagttgcattcgcgatggacaaaaagccacaagccacctcctccggtgttaggagagagtcgccatctttttcctcgttgatggtggccgttacatccaggaacatagtagtgactatgtccgtgttgagaggcttggggaatgattccttgataatccgaccgaggaagaggttggcatctgtcacagtcaaaggtcctccctttccatagcaggctggcccagggttggcaccagcgctctccgggccgaccttgaagagaccattctcccaggacaaaatggaaccaccacctgcagcgacagtattgatatcgagctggggtgtctggatagaaatctccgcgagtgtgctctcgaacacatgttcaagctcgcctgagtatcgggccacgtccgtactagtgccacccactaatttatattgttagttccataaatcatcctcatgatatgacagagaagagagcttactgtcaaatccgagcaatggtgttgcgtcactggggtcatagcaagtccttgagacgccgacgacaccgccagcgggtccactgaggacaccgcgcaggccagcaaaatttttgaagttagtcagaccgccgtctgactgattgaggaatagtttgtttccgtttttgtcttcgagtaggcccttgaagccttttcggaaactctcgagataacgtgttgtgacaggcgtaaggtaagcatcagcgacagctgactgactccgcgggatcagctttgccatggatgaaagtttggaggacacagcaacgttgaagcccattcctttggcgagatctgcgacggcaagttcatgatcggggaacatgtatgaatgcatgagggcaaccgcaacatcacggaatccctggtcccagagacgcttcagatcgagacggactgcatcgaggtttgggcttttgagaatcctcacggcctcccctgtgataccttcccgcaggtcaacatcggcactaatgtcgatgatagttggttctggattttcgccccatccttcgatggtcacacgctcatctacctcgataacggtttcgtataacttgtccaaacgtttcacggtgagatcgaataggtctgggcgggcctgatttccaattttgagagcttcccggaagcccttggtggtgatgaaggcgactctctcgcccttcctctccagaagtgcatttgtggcaactgtggtgcccatgcgaattgattcgacgcattccaggtctagcagagtcccgcgggggatgctggctcctgttgcgatttccagaacctgtcgtatacattccgttggtgcgtcgctgtactcgtcgggagactcagatagtactttgagaatgacattttcctcgcggccaggtatttgagcccaggcgtctgtgaaagtgccgcctctgtcaatggcgatcagaactcccttggatgccattttgttgctgctcttgttctccttcttttctgattcaaataactagatccgtgatgatttacagacttgcatggaaatattcgccgtttaatagtcacggcatgcagatgtccaggccgatatagaccggcttagggttagatttgccgaatgtcgggaagtgcagctagcggccgcgggacttgggagataagcgtatgggcgggggactcagccgggggactcaatcagctattttagtcggctgaggagcagccaaaccttgttaaatcggtaatacgctgcaatgccgatccgctttcccccatgataggtactggtggcgtccactaaccccaggatgcagataagccatacccacaaattgtatgacacttaggtaaatataggataaatggactgaggtagccaggcattccccatctcactgggaagtgtgttgaactttcacttccgaattctatattcacttaagacctagctcacttcaaagtcgagcaatatcatgacggagcccgagacagagttggacatgctcaagtctgccaagatgaccaaggaggcctcgaattgcgatgaccatgagcttggtatcacaattgagacctatgatcgcaaggccgaaagcaaaatgttgcgcaagtttgacgtgagtttggctgagtaccttgttcaagacgccatgagtagaatggagagagggcatgatactgataatcttccattcagttctttgccgtcatcccactcggctttttctacatgatggctatactggatcggagcaacctaggcaatgcacaaatcgctggcatgcccgaggctatcggcctcgttgggaaccaatttggcaccgctaccacactactgtactaccccatattgctagcatcctactgcgacgtctctaacggagacgtagatatgctacttatgttcccttcgaagccccgatttcggtgttagtcaagagtgttggcccgaaagtccttatttcggcctccgccttttgttggggttcttccacactgggaatgggtatgaatgaaacacatccccgaagccagcaaaatcctttctgacacacggaacagcatttattacaaactacaaagggctctacgtctgccgtttactgatggggctgtttgaagcaggtctcatccccgcaagtgaggtctacatggccctggtttacaatcggaccgaaagagggcgacgcatgtccttattctacaccttcagctgccttgccagcgcttttggtggtctgctagcatatggactgacacagattgatggacccaacggcttcgaaggttggaggtggctgttctcagtggaagcagccatcaccatcattctagttcccatcttctacttcgtgttcccgaaaacccctgttgacgcctggttcctgaccgatgaggaaaaacgcatcgtccgggcacgctacgacaatgacccacattgggccttcgatgagaagttctcgtgggttgagcttggtaaagttttcgccgatgtgaagttttatgccttctttgtctaccagttctccatcaacctcacacagtttggcttcactacctttctccctactattatttctggcctcggttacacctctattcatgccaatctgatgaccgttcccatctatatatcggctcttgcgttcttccttgtcatcgccttcgcttcagaccgttacggtatgcggggaccgttcatggctggccctgcgggtttaattcttatcgggctcaccttgctggtttcagttgagaatctgaatgtgcgcttcttcgcttgtttctgtgagccatatcgatcttaattgtcccttgcgattaaggaaaagactaacactcgaacagtgaccgcattcggcctatatccagccgcagcgctgtcgatgatgtggctacaagacaacgtcgcaggcttttataagcggtccagcatggtcggcttcacgctgactctggccaatacggccggcgtggtagttgggcaaatttttacctccgatacgaagccctactataagaaaggcctttcaatttgtctcgggttcagtgtcctggccattgtaattgccatagctctgatggtgggcatgaagatcgtgaacagaaggagagaggcagcaattcgtgcggcagaggcggccggttctccactcccccgtcaacccgagatgggagactgggacgtgtatttcaggtataatatctagagtatgtgtcgaaccacagagattcggaataagctggtatgccagggagctggactggatgggttgaaaagcgctgtctagcagcttttgataagtgtctcatattccatgtgctattgccatgtcaggcaacaggtgtcctttacaattgatgtcctgtctataataaatgatacgtaatatcatattgcactatggaggttagaatagtattggaagtcatactattgaccaagtcagcagtagaatatgtagaatacaacacacatagtattttggccctcaatacatacaccccttcaaaactcagattgatactgttattttacatattgtttacacattgtttacagaccgctcaggtgactgttcatgtgactctgggatttttctgccgattttcctatttttcggaggagctcccgataaccttcaatccgatgcgcaaatgagaatcctcaaattttgtggggaaaatagtagcgtcgccagatatctccaatcatgaagtgtctagctatatatggacggagacagaaacaatccccacagataagacccggcttgtgctagaacatcccgaggctttgagccttgctgccgatatccaccctctggatcctggatactcagataatttcggctcagcgtgctctaacaagtacttccgctttagcttgacctagccttctatggatcgtgcggagtcgtctggcggcgagtcgcaaagacgcgcgaaacggacaaagaggagctcggttgcgtgagcaaacacccatgacccactcttgtcatttgagatgttcaagctgaatcaattgccctcagatgccggagatgtcatgcccagaaggtcaagtgctctggaggtaccccatgcagtgcctgcttgaccgctggccaggcgagtgcttgtaactatccttttcgagagcgaaaagtcacaatatctgagaggtaggtaatttcctcccagcagctggtctgtacgcgattatatcttatctaagagtgccataaagctacctgaaacaattggaggccgcctcgaatgctctcagatgttacgattggcatgtttatgtttgtttttatgtttgtttgcttgtttgttattggcattattgcaaagcggtaagcggcagctatattagcaagctgcctcccactttgcaacttgcttctcagacatcaaaatgaatctgcccgcagccagccgaggagtcccattgacgtcgaccagctacttgactcgacgataacatcagcagtatcagacctcggtgtcgtaaacccgttgttcgatgcacgccgggagaagccacccactcagatcgtaacggaaccgtccttcgttggtgaagcggcatgcgatgcctttatcgagaggcttctgcagtcgctcagccagagagaagccaactcactcccgccaccgcacaagtacatgatagaccttcctggagcacgtatgcccgccattaactataccctacccgaccgagtccacgccaagctcctgatccaggtggccgcgaggttcatcggaaatggccagcatctctatttaaattcgtatatggaggaggtcgacagtgtctacaaaaaagatgccgaacctagctctatatggttgtgtaagttgttagcattggtcgctcttggtgagttgtactcgaataggcggcgcagtaacggtgacaatagggcgccaggggaggaatattttgtatctgctttgggtatgttacatgatcaatatgaagataccacaactctacatgtcgaggtttatcttttactggttagtcactggatattgtcgcgtctctatgaaatatacctaatttcggcaggcctgttactcgaatgcactcggtcgcgttagatctgcctacacatattcaggtattgggatgagaatcgcgctaagccttggcatgcatcgatcatcatcgtctctacataccagtgctgtcgagcgggagtcccggcgccgcatatggtggtctctttacctttttgatcggcttacttgctcgaagctcggccaaccaacggctgtgaatgacgatgacatcgacgtggagctcccgacgatggatgggttaacacctgaagagaaggaagaatttccagatccacgccacttattcgcgagcgttggccttgcgaagatagcaggagacatatgtaagcagttctcctctaactagccattcttcctattcacagggacataccaggctaacactcgaatacaaataagtgagcgatatatactgtatgccaggacgaaagaagatccacttcgtgaagagggtccacggtattctaagcaacctccgagactgggatgacacgctacctcaacacctcgctttccgctgggacgattcaaaccgccatgtcgccagtctccacctctgttacaaccagtgcataatccacacaacacgaccaattttactacacttattccgcgtgcagttctgtctggatgggtcccgcaccgcagaccagccatcgcagagcttctcgccgacgacgacggcgctggctgatagctgcgtaaatgcggcgcgtacatccaaccgcattctttccaagctatttgttgacggcacattggctactctgggctactgggacgcgcactaccttttctcttctactctgattcttctcatgtccgccgtcatgagccccagtcaggctgtctctgacgctgttgacactgctctcagtgtgctatgctccatgcgtgatgatggtaacgttcccgccaatgactactatgaacgccttcttcttgtgcagaaaagcattaccgagctgagggatggagtcaggaaagggagagatggtggacccccaaccgccgcgcagagtcctcaaatcgcaggcacagcccatgaaagggcacagttagacgaggttggctgggctgcacagaataatgacgttggaggtgttgggatcgaaaatttcaggctcgaggacaatcttgacgcgctggccaatccttatattgacggcttcttggccgagaagtctttcacctggccgtcgaatgcatttcctgatggaactaccttgcagcagtttgcgaacgagctcggcgttagctttggcctactcgaccctcattgtggctagagggataccggacatactaaactcttcttatttgattctactgtgtatgcttagcgcattttggaagacttctctggcttaagcaagggtataagctgcattgaattcattttcaaccctggtagtagatatcaccatgtgtagatgagacagaatggtatgaaatgactacacaatggctgctaccaggcaaggaagaccactagcagaaaatacagatacagctcagaatactaacgaccagtgagcaatgtaatagcgtttgcacaatccttcccagctcgggccaagatgccagagtcttgctgtaccagaatgaaaccggctccgagcttattcaaagcccagtcatgcagctcttcattctcgtagataccagcaagaccgaatgtcttgccatgtttcttgcaggcccgactcacggcctccacagccgactgaaatccatcgctcttgaactgtgcagggaccccaagttccgtagataaatcgttcgagccgatcagcagcacatctatcccatccacggaagcaatctcgtccacattatcgatgctctcccgggtctcaatcatcacaaaaacagacgatgcattggagttattctcctgggtgaaaacaccgaccggcgtcgactgaagccggaaatatggcagctggcctgtcatagacctcttccccgtaggtggatatttgcaaatggacactgcgcttagggcatcatctgtggaagcgaaaattagtaaaagaaagaaaatcagggtatgtttcttacctttgttatgaatatggggaaagatgactcccatggcaccgccatccaagacgcgctgcacgaagccgtcgccacactggtaggggacgcggacaaagggtgtgatacctgaacccaggcccgccatacacagcagacttgcatcattgagagatagcgtcgagtgttctaggtcgataaagagcgcatcgtatccactgttcgccgccaactggaccacttgggggttggtgactagccggataccgaatgcctattatcaccagttagcagacagataattatcacacagcggtcactggaaattagacttgccttgcagatttggcccttcgccgttttctgcagcaggttattggtgtagctggaacccataatgaacaaaataaaagtcgaagtagaagtaattcgatttgacaacttgtaaatgctttgagaggagtcgagatatcttgacacaggcaaatccaatccgctgactccttttgtactgaccaggatctatagatgtttatcgggaccggttagtgcaggccgtacccttctttttccgggtcggctcctgagctgccgtgccgtaacaagaacaagatcgggtaggctgccgactctgtgagaaattacaccaagttcaccttcaaaaatatcgggttagtatgccggagagatgttggggttatgtatttaggtgagaaattctgcgcaagaaacgcggagtagcaagagtctgatacgagtcttgccttccatttccctctccaaacttcattcgatcgaaaaaaaaagatgtttgacaatatacccccgggtcccgcagaccctttttttcatctgaagaaaaaggccgatgaagatgaccacccagacaaggttgacataggggtaggcatataccgaagcgagcaagggacctaccaggagttggctgtcgtaaaaagggtaatcatgccaaatcaagacaaagatgatgagacggttattaacgagaggtacccataggcaaagaaaatactggagcaactcgagttggggcatgatgtaatattccgcatatatcaaagatcccaaaccgcaccactaaccaataatttagtatggactcactactggggatgatcgattcctcaagctcgcagcggaagtcatgtttggccaagaaaatgaagcgttggtatcggggcgggttcgtctccacagaatatttggatcaccatatattaatttcccaaactagatcgcatccgtacaaactctctcgggtacaggagccaaccataccgctgctgtcctcatagctagactactggatccaaagccagccatctacctcggagtgcctacctggaacaacatgaagccgctctgtgagtatgccggcttagagaccatcgagtacccatacctagaccgtgagacatccgaactctccttccagccctgcatcgacgcaatcaggagtgctcctacagggagtgtatttgttctacagggctgttgccacaacccgactggcaaagacatcacattggatcagtggcagcggttcggagaggagataaaagcacggggtcacctagctttcatcgatatcgcctaccagggactcggtgatggattggatgaggacgcagcaggcgttcggatactatcacgtctcggtatcgacatgatcgtatgccaatcattctccaagaatttcgctctgtacggcgagcgctgcggagttcttcatgtagtcacacggtcagtcgaggctgcgaccaataccaaagaccagctgcggagcctaatacggcgcgaatactcctcatcgccagcgtacgggtcgcggttggttacgatcgtgctagaggatcccgagctgcgtcagcaatggtaagggacttgctagtgaatggtcgttatttctactcactgatgattgattttctataaagggttgatgaactcgcgtccatgagagcaaggttaattcagaacagacaacgactatacaaagaactgtctacgattttgcaagtaggttgtcttcccttgtgtccctatcaagattacaggcgctaacataatatactttacagacaccaggcgattggaaacatattgtggaggagaaggggctcttttcgtacatcttgtcctctcccccaaaacgagtcgccataactgaccgttgaccaggtgcctcgcgatcacccccgcacagtgcaatgccctcaatgacaactaccacgtgcatctcccggtgagcggccggatcaatgttgctgggctaaacaataataatattgagcggacagctcgtgcgatagatgcagtggtccaagggaatcgttagattgttgattggcgtctatgattgtagcataacatgtgctttgatctttctcgtatcaaagtttactagaaaaatactctatagccgacctccgaagcattattgctgataacttcaatttctcgagcataacgaagtaacaccgccttcagagcctattaacaggagggtacgatttatactctccatataaaaatagcacaaacctccccactctagaaatcaatataagttcctgaagtttaaaaatacgattctggtttacatatcgacctacctaccttttcatactaccaacttatcaaccctatcattcaggaaattcaatcaagatgctagcaacattgcatcgaaagtgacagaaactgcaaactgtggatgagccaagggacagctacccttctggggactgggatgggaaaagttgaaccgtgagaatgaggtaacaattgtcagctaggagggtaaatcacttgacagactaaccatgtcccccgtatcgctcttattgcaagatcgtttttctcgtggctgacaagaaggacagcaaatgttgtgaatacatttatacatccatatctccgatcttgatgcctgacaattcctgtaattcctgataattcaggcatcacggccttggcattttttcacactccacaccggccaatgtcaaatgaagggcgtcggcaagttcgggtccgatggcaccgaaagttttctaacatccccaatataaattgctggtcctagccaagtgtatatacttctcggatgttttagacggaaaggttttcactattcttacatattgtctcgaattgattgacaatggcgcattccgattcagaacacaaattgaagaaaccctggattgaaacgcctttgatcgagtcggcaacattctcaaaggctgccggatggtacgactgcgtttttattttccctaatcaaatttctgagctgactaaaaatgtcaatgtagtaaaattttcctcaaattggagtcgctccaaccttctggctcgttcaaatcacggtgagttcgacaatccaaaaaggaatttgatacagaatctaaactagttcaggggaattggaaacttgatcctcacatctctttctgatccatcaaacaatggcaaaaccctgcattttttcagctcctcggcaggcaatgcggggctcgcagcagttatagccgctcgagatctcggttgttcctgtactgttgttgtgcccgttagcgcgaagccaatgatgatccaaaaaatacgcgctgcaggagcttcggatgttatccgccatggcgccagttggttcgaggctgactcgtacctgcgaaagaatttcatcgaaaatgaggacagcaaatcagatcccttgaccaggaacatttatattccaccattcgatcaccctgacatctggcgcggtgcagggactctggttgatgagctagtcaagcagttacctccaaggcaccacggaaaaaccgatacctgttgtccgttcccagcagatgcaatcgtttgcagcgttggtggtggtggtcttttgaatgggattatcgacggccttgagaggcatttgccagtgcctcaaccggcaacacttccccagcaagcggcgaagaaacttcaaatcctcgccgttgaaacatccggcgcggattcgctggctcattcgctacacaagggttacttacaccctctacctgcaataacatcgcaggcaatcaccctaggggcactctgcgtggcacagcaaacactgaagaacgctcaatctcctccgcccggtatcaaagtcactagtattgtgggtaccgacgccgatgctgcgaggggagttgtgcgtttgtgtgatgagctgcggttggaggtcgagctggcttgcggaatcagtgtccaagttgggttagataggctaagggaagtcatgacagacctaacaccggatagtcgagttgtaattgttgtttgtggaggaaacgatgttagttccgaaatgattacgggttaccggcaaagttcgagagtggctggcaacgaaaaacgacgggaatcgatgttgtgaaaaatctgatgttggaactacatttggttgttgaaagatcgtgaattacctactcccctggtcagacccatctgtattgatgcttaagggtaatattatcctcttgctctcatctaacctcattccgtgtctaataatgataatcctcgttaatcccacactagcgagtctaccattgcattaagtcttcaatgcccaaatatcactgcagtcgaagagatccgtgatcctcggcttcatctagcgcatcggcaatacgcgacccctctccctcgaacagcatcccgtcgtaagtcgccgcgcctaaaacgcagccaacaataggggcgaagaggggaacaacgaaatagtagttggccgccgtaaacacctctcggccatagacgatagcagagaacaatctcgggccaaaatctctggctgggttaatggcctggttttattagtacgatttcctaacctgataacctgggaacatacataaccggtctgccagcccaatgctgctccgatcatgagcagcagcagaaagacagcgatctggggagcaggaaatcgacgggcatttccaggatcggatatgctgagaaggccgaacatcagcacagctgagcccagcatctcagaaaagacagcctcccagttcgactggaagaaggcacctgggtaggtcgagaagatgcccgctgaatggtgaccgaccgggctcaggattgatccgccgggaatggtgtattcaggatcccaagctttaatcgccgaacggtagttgatatatacgatggcagctccgacaaacccgcccaggaactgcgcagccagcttgcctgggatttgtttccattgcccttcagatggacgtacaagggcaaggcaaagagtcacggccgggttgatggtcgggccgggatcggataaatagccggatagacacacggcagcagcccaggcgaggttgatagacagccaggtgccgtagttgtagtcggagagcagacattgggcgacaactccatccccgataacgattagcagagcagtcccgagaaattcagccgcgtatggcttcagtgcccgacgagggatcatttcggtgaagatggtgttgtaatccgatgcccttcgtagatacaaggtgggatgagggacccctgattccaaccaaggttgatgtgcgtgtttacataatttaataaaccggggacggtgacgtcatattgctcggatcttcctccgatatgcccaatacgggatgccgattctcccgatatgggaacaagttgttgtcccaaggtgatcaaatggggtttctactgtactgcttttgcacccagtcttcgccgacacagaatactcgactacatatttatgcactaatatgtgattttctgcaagtgaaatctagtataaatggcacttgcattgtaacaacttgagagttctaatctctttcatactaccgactcacctaaatctatcggtctgaagaatgcaatcatcatactagcaagcctatatcaaaaacgatagaaaccgcaagtagtcacctataccaagatcaagggatgcctatcatacatcttcaatatcaaaccgcatgttcaggcgttgaaggtattcaccatcatggaaagtaacgatcctagcaattcgttttctgccttggccccacgcacacagaacaaaagctgcaaccgtcttaccaattgcagtacccagcagggcatcaaactcgcacgagggagtccagatccggtgttcactagaagggtactcaatcccctcggttctatacacttcatcacgaacacactgtaccgtgtcagtttcaaaaatagaagtaacgaatacatattcaagactgttaagcgaaaaatccatctcataggcagccttagttaattctgatatatgtggagcggtgcttcgccttgatcgacggatccagtcaaggaagaccaccccttgtccagtgcgtccctcccagcccaccggtggaccttgtcgattatggatttctatcttgttaagctcatctggtagatcaaaagggtagatgcaggtatcccatgctgaatcccaccatacagcttcgtgggtgacagaataattctggggttggggatcatatgtcacagcgaatgtggatctagggtaagggcacccgggctcatgttcacgttcaatccatcttcgtaggcttcgtcctttttcttcccatggaaagtatctaggcattatgggttaggggctaagagatagttaggagaaaaggcctcgaataatactcaccaactcgtcaattaaactggatttgcagacgctatctagtacctggctttatatctccgatatcacagactgaggacagagaaggtccataaataccattgtttgaataaactctaagtaaaggacgagtacaaaggataccactatttaaggggaaacaataagcctggaaataaaggaatctgctagagagtgaaacaggtgttagctaaataaagcactggtatcttttggagatagtaattgattctcattctgtttatttcagtgaaggttctatttgagtaagattgaatgggcgttttattgggcataccaagttacttcttgttctctttcgtcattttgttccatattgttttctgaccaatttggcataagatgattattggaaatagctagtccagaataacccaaaactcctacgcgaatttcccgatacctggcttggaactaaggtccgttcaatttgaagatactgccatgatcaccagctacttgattagaactcactcaatagtgtaccatttgctagcaaaagaatgctgaacccgggtcaggttgtttttgaaggtgctcacaagaactatatatcctccgagggcgttattatctagcctgatgtcttcttctgctcccatatgtcttcccaggggtttgatattaattgcacccctgatcaaattttaaaccactcaattgagcagcattgaatatatttccctatatcagaccataacatacctgaagttaataaaaccgtgatgtttatactcccacaccgtcgtggcagaatcaaacatgcgccaaacccctttaggccaagcgccccaatgatagccaagcatccaaacaatccacgtagattgcaaggagagtcctctaagcatcccacaagcataatcatatctgctatccagacccaataaaggtatgtgaatatatctaccctgtttgaaagagactatccgcaccaattcgtccctaaatgcgccccttctccccgcattgcttcggggtcgcgcgcataccccgtggtatttaggccatgatgtcagcccaatggagtgtctacacgcgtcaaagtttgagtcaatctgcttgtatactaacaaaattctctatatagcgccctcaaacattcaaacctacctgccgcgttcaattaattcacaatgtctgtcgaagcctcagcatcggtacgttaatcgcagatgacaccacagcccgcgacatatcaatccgcaactaggctgcaagaatacgcactgccattacattgtcacaaacggtcctaacaaccctccagcccatccctattgaggatctcactaagatcaccaccgaggtacggccgttccccagaataccccgtagaatcaaccccgcgctaacattttactctaggcctgttcggatgccctcaagacaagccagagctacgagcatgacaatgtcggaacctggaactcccagattatcgtaagcactaacacccaaccgcgcaatagcgatactaacaattccccgcgcagaacaccgtccttaaggccctgatctccgctaccgcacctaccgatgcctccaagcctcctccctaccgcttcaccgtgaacagcacaatcgtgcagcagggcgtgattgacccgtccatcgccgagggtggcgcactcagcaatgccggtaagcgtggtatgcattccgcctccggggccttttgggatgtcaaccgcgatggcatgtggactttcaagtacactggtgctgaggagcgcgggattgatgttgttgtttgtgtgacatggtttgccgtcgtataaggacgggcctgattttttttttggcctgttctatgatgagcatatccatggatggcataaaagtccataagcggaggtcgtgactttgtctgtgagaagttccttgaactccttatcggctttgtatcacgggcttcatctttctttttcatgtacttgaacatgtgtttttagtgctctgggtatgttcagatctgctcttctctttctcgtgtcatttgatttgagttcggtctaagcgtggtgttatgtttcttctagtttagacttgctggtattcttcgagaaattggatagccttgcaaatgtctatgggacatccatggatgttacccagtatgtatacatagtgcggagaaagaaaacttggcatagatattggaattgttagtggtatctcaagactatgcaggatcctctgtgggatgaaactatggtaagtaaaaatgtctgcagaacaattcaacgacaaaggtctccattgaccagccgaaatacgccatgtaaccaggaaaaattgggaaacacccatcattgcttgcgccatgccatgtgtagattacccataataatgtcaacgccagtaaagacccatcaatcatgaaagcaaaacgccagttagttgagataactcaaccttgcatcttgcccctagcgaggctccgaatagtcatttaaagcaacacaaacggaacctcgatgatggccgctgtactggcggatgatgttgccagtgccgagctcccacagacgggcgtagtgatcactggagacagtcacgaggtatgcactgtctgcagagaaagcgcagtcccaaacccagcgctggtgattggcgagggtggtctctaggaacagtgtgtggttgactggatccataggaggcccgtcgggggatgaggtgaatgtctgttgcggtgtctcttggcgaggagggttgtcggtaatacggaggagatcacggtcttggacgggtgcgtcgaaaatgcgaagcagatcccgagattgggcgggaacctcgacaggggttaccggagcttccaccggtgctgcttcaactgtcgggttcaatgcctcattctccttccattgctgtaatgccagtttggcaggtggaaattcagcgtcgaggttccaaaccttggcagtatgatccgcagagcaagttgcaagatgcttgacatcgggagagaggagaacacgagtgagatagtccttatgcgcttggaaggtacagacggggatgattcgggtggtttcctcagtttggaccatgcgccacaagtagacgttgccctgttgaggtattagtaaagaatcataatatctgccgtgaaacaaaatcacgcaccttcttgtttccagcgcaaagcaaggatccatcactggcaacgctgacactgagaaccgcagtgtcctcctccggaatcaattgatgagtacagacactctcgcccaaatcccagacacgaaccataccggcgtggtcaccgctgatgagctcgccctggttaggatgaatgaccacatcattgaccggagcccgatgaacgtagtttcgctgcaagctaccggtacgggtgtcccagacttttacagttccgtcctcggagctggtaaccatccattttccctcgcagtggaatgccacgccggtgatgttgcttgtgtgaccttcgaaggtaatcacggggttaggattggttgacttgatgtcaaagagtttgacattgttatgacccgcagcagccaggaatctcttatccggggtgatgcaaagacgattgacttgggagtctggatgctggattgtacgtgaacagatacccgagagcgcttcccaaaagctagcagagaaatagtcagcaagagtcccggtatgaattatcgctctgtgggtgctggataaacactgcacgcagctaactaagtgccaacttaccgaatggtatggtcgtaccccgctaaaatatgcaaccaaggtaattagcttaatgcctagaagaatgcggggagcttcttatgatattccacttaccggtgcatagaatgacactcatattcgccttagttgggttcaaatgaatgtagcggggaagtaattgatcttcgtggcctcgttctgggtacctctggagtcccttgaggcgttacgggagctgtcaaggcgagacggcccagaccgaacgtaggatggagtcccgtttactgccattaccaccacgtgattatagatccacgtgagcaaagcggtgtcgctgtgtgacgataaggcgataaggcgagggcggtaaaaaggcggtgaagctgaaagggcaggcggtcaaaaaggtgcaaagaactagttacgcattattgcttgtctaacaagatccgttaatgattttatagataagctaataactctgctctagaaatttgtctaattttatacaattgaacaatatcttgtgtgaattcttcgtgttgtcaaacttactctatctctagtccctgaactagattgggcggtacgtccagcggtgctcggagttaacatattattggccaaaaataagttaaatctccagcagaataattgattggccggcagaaaaaaaaacataccgatgtagtcaaacaagtatgtatttgtcgtctctattgagctgtattgatccctattggactccattgtttggtgtaagacaatagaaatgtcactttctttgttcttgtttgcttccattttgcctgtctatgagccctaattccctcctcggttattaccatccctcctctttgatccctccacaacatcttcttgttttccctaccctcttcaatatttataaacttaatgctcatttctaattacaatggctctaattgaccccaaccagcctggctttgggcttgaccagcctgactttgggcttgaccagcctgctttcgaccccgaggcctttctcaatagcctcaccagtctcgatgccaatgtatcttctaatgcttctaatgacttcgagcattatcaaatccccgagctcttgtgcagtttcgatgaatttttcgccagtattcctctcgatgacctcgatcagtctggttttggacagtccagttcagccacatctgtcaactgctttacccaaccactatccagcaacatccctgcccaggcaccctacaggcagatgccatacgacccctcgatcggtattgcatacacctcggaggacactgacgcctccaaggtccgaagttgggagaacctcatcgcccaggccaatttggtcaatgctggcgtgccaccctctactcctcagatcatggaagaggagacagccagccaaggcctccagactatggactcgcccgactctctgttcaactctcctggcacccagtctgtcgcgagtgtcgagagtgtcgagattgttgagactcccagtcccacctcgtcgactccttgccctccccgagctcctgcagctacaactacaccttcgaatgccgcgacaaatgtgattgtaagttcttatttatgattgaccatttcattagaaatatgtcctgactgtctttcacaggcaagcgccattcctagccccaatcctcgcgccgtgcagcttccgcaagcgttgacgaaccagaagggctatgcccaacacgtttcaccattcgcacctgttgcaacaattgctcctcctatctcctcgatgaactctcgcgagcttgagaacgcgcgcgctcgaattcagaccttggctagagaacgcaactactaccaacgtaatttgcggaaggcgaccaatattgaccctaaatcgggcaagaccagtcttcagctgctacaagcggagaatgtgaaccttcgtcgggccaactccaagcaatcccaagaaatccagagaatgaagaatgaggccgaagcagccaaagtgtcgtatgcgacactggctgagtactacaacgatagcctcaagcagctgcacaaagcggagcttgagttggaacagctgaggaaataggaacccaagtcgtatgtagctttgaaaagatgttcacatgcccaacatatgtcttctgagacgcaagtgtgtccttatctttgtgcttagccttcctccgagactctttctacattgaatacaactatgtcttatgttttctctgcccttaggatttctaggatctaaaagtcaaccataaagctccatagataatccgtgattgagttaatttttgtactaggcagcttcccagtgagaactttattctgactgttgatcgatttcaactgtgatatcacatagaaagatcagagcgttgaacaaaacaaccatgttcctcattatacaaaactgtcgatacgagtgcaaatgcctcatattgggcaacatcacgaagtaacagcacggccagctggcccgacggcaaggcgcttaactactaatcaaaagattaaaggtgatccctacgtcggtcacctttttttggtttcctagcttatatgacccactagtcaacatacgtcatgcctgaatatgtatctcgtcatggcggattcgaggagacccgtcggtctatcaggccgaacagcctgtcaccggattgcctgttgctacgaagtaatagaagaagcccggaagtcagtatccccatacttcatcttcatccttcatgtttgatgcagcgcttaacaaagcaaaagtactaactccctcacagaattgagaatactgaaccgagatgtctgataaggataaagatatcaaaatccacacatgggatgggcccgatgaccccgagaatcccttcaattggagcttcagatacaaatgggtgataacgattaccgtttgcttcatgtaagaaatgccatctcaacacaaaatacataattttaagcatcaaaataacatcctcaccagctccatcctgacaggaatccccgcaggaagctacggctccggcaacgactggttgaagcaagaattcaatgtccaaaacacccccttcccaaacctctactgggccaccacttcctggaacatgggcgccgccttctggccactgattttcgtccctctgacagagtcctccggccgcatgccaggatacttcgtggcgtatatactcctcgtcatttcgctcttcccatccgcgttcgcaaagaacttcgcgacactcatcgtgactcggttcttcggtggaggtgcttcttccaccgcgattaatattgtcgggggaagtatctccgatgtgtggttcggtaacgaggctcgcagtctgcccatgtctatattcggatttacgagtgttgtcggtatttcacttggtccatttattggatcttctattgtgcagattcatagatcacacccatggcgttggtaagcacaacttgcatttccgaatatcaatttccaaaatcccatcatgctgaccacctcccacgtaggatcttctacatccaaattatctacaacgcagccttgatcccggtcttttggctaatactcaaagaaacccgcccagaagtgatccttaagaagcgcgcaaagaagatccgcaaagaaacaaacctccccatctacgcctcttccgaactagatgccccaagcaaactcaatctcttgagactctccttccaacgcccaacacacatgctcatagccgagccggtcgtgaccttcttcactttatggataagtttcgcctgggggatcctgttcctcttcttttccagcgtcgtgcaaacctactccacaaactacaactggggtacgatgtcaacaggcctgatacagctcgccatctcggtgggtgcggtcatcgggacagtcatcaacccgctgcaggactggattcatctccgctctgagcggcataataaagagaacccggggaaacctatccctgaggcgagactgtacacatctatcccgggtagtctgctatttgcggcgggtttgttctggtacggctgggctagtcagccgcatgttcattggatcgtgccgactatcggtgttacggcgacagggattgggatctattcgatttatatggctgttgttaattatttgactgatgcttatgagcgttatgcggcatcggctttgtcggctgcttcgcttgggaggaatacttttggtgcgttcttgccgcttgcttcgccgcagttgttctccaatctcgggtatggatgggcggggactttgcttgggtttattgggattgcgttgtctgtcgtgcctgttgttttggtttggaaaggcccggagattcggaggaggagcaagtttatgagggaggcgatgtgggagccttcgcagaggccgggctagattgatcgtgggaggtaaatatgtatagagtaaacacatgaatttattgttttattttgttcttatgtccatctaatggccattctctattgtaaaatgccaagagggtagtatagaaagacaagaaaccaaaagccacaacttcctccacatgttctatcaactctgaatccaaggtgaaaaggatagtggaagagggtatcggggcaaaggggtcaaggtcaggggggaatggccgtccacatggatgttgcttttgggaaatactttcgctatcaaacattcaaccacaacaagcacgaaaattttatttttcagcgcgcatggtgcggaagaaatccatgacactagtgtaaacaacaagcaaaataccaccaccagggccgagacgcaggaccttgggcgtgaagcccttgtacagagcagcgaagccctcctccttcatcacagtaccgagagcaggccaagcccagttgtacttggcgacctgaccggggaccttggaagtgttctggatgcgggacttaacaacatccattggggtgttgacgacagtaccgacgataccaccaatgctaccggcaatcaggtcgttgcgagtctgctggttcttgttgccgggctcgacggcgggcagctgagcgcggacctggaagatacagccgaagtaaccggcgttccacagaatgtggcgccacatggtcgactcaaggccgttgtacattgccagcgggccttctgcggccacgatctttctcacaacgtcgatcatgccgttgtacttgtgggcctgtgccttgtcctgaagacggatcttcaccagctcaaaaggaaccacgacaaaagcttcagtagctccggctgtggctccggtcagggtagccagtccttgggtctgcttgtccacaccgaacaggttgcggtagaaagcaccccagctgtcgttggcggcgaacttggtcgcacgcttcggcgcctccatcaggatgggcgcggaaataccacggtatagacgagaagcactttatacggtgtcgcatgttagagagagagccgtggctgcgtcgctggagtgatgacatacccctcgttcttgacaatcttacggaagcagtcgaacatgccattgtagtaatccgcaccgggaacagcgggtccagactgaagctgactgcaagaggatatcgttagcccgtgtcatataaagtccgtgtttattgcgaccggcggcttgcttacattcgagtcttgagcacgtccagagggtacctgcgagtcacatatcgtcaattgggtccaattttcacactgtaccaagcatatctccaacagaagcacttatgagaccaaggaaaggaagtggatagccgtacatgatcaggatctgctcgtgcggggagacatgttagtcaatagaacatctcttggggggggggggggggtccgacaggaggannnnnnnnnnnnnnnnnnnnnnnnnnnnnnnnnnnnnnnnnnnnnnnnnnnnnnnnnnnnnnnnnnnnnnnnnnnnnnnnnnnnnnnnnnnnnnnnnnnnnnnnnnnnnnnnnnnnnnnnnnnnnnnnnnnnnnnnnnnnnnnnnnnnnnnnnnnnnnnnnnnnnnnnnnnnnnnnnnnnnnnnnnnnnnnnnnnnnnnncgggggggggggggggggggttccgacatgacgaatcaagtcggtatcgtttttcaaagtagaagcaaaagatacatacctctgagacaccagccaccgcaccggcggcgaactggtagacgaaggggaggggcttctggggagtttcagacatgatggcggcttgagctgggatgtcagtacggggccttaattgggtaatattgggatcgaaaagtcatcgaaaaacacagctttgcgatcagatcacgacatatttactcacaagaccttaaagaacgagggctggagaaggaagaagtgagaagagatgaggttgccggtgtcggcgagaatcggtgatcgggtccgagtgcagcagccggtaagcctccgcctgtacgtttagcccgattactaaacccccgtggggagagcttctataaaattcacattccgaactgtttgcagctttattgtcataaattcatgtgcatcgtgtcttctcctgtcttttttataacatccaaaatcctacacacatccccagcgtcatccccaacatcattttgctaatccgatgcactacaccatctccgctagcagcagtcgcagtcgcctgttccttggtgacagttgtcgcagatgcggtgtctgttgcagtacagctagaaccacaagcgaaccccgtgggacagcatcctccacccacggtgtcggcacaacggaaccagccctgagcgcacaggttcccaccagaacgttccgttgttgtcgcgacgggcgctacaatcgtcacaccgtctgatgtcatagtcgtcgaagatgtggtcgggcatgatgtcgtatcgcagtctcgtccagtacggcagcagccaccttggtagacagcggagcaggcatagaaaccagtcgggcagacatcgctggttactgttgacaggttcgtaggccgtgctggtggtgccaagctttcgtctgttgtggatgtgccgctttgggaagaggttgtcgaggaagtcgaagtcgaagtcgaagtggaggttgaagtggaaattgaagtggaagtactatccggcttggtcgaataggtcacagtagacaacatcacggtcgaatgaagagtcaccgtaataacagtgatgtatgcgcctactcaaccaatcagcaaaaggttcatattcccaattcccatcaacaatctgggaatattcacttacatcctccttcaacacaatcatatcccgggatacaacacccaccccccaaagcctgcgaacaagccgtatacccactctcacacgacccaatagtcccagagcacgtctgccagctaggacagcagcccacatcgccgttccctgtatcagcaacaatctcgcacgtctccccggacccacagcagcgatcggatcgaccgatggatgtgcaccccaatgtcccagtcgggcacttgaaatctcgtttttcaaacaaattgtttgcgctattgttttctcggggaaggtactgactgtattcatctgtgctcggggagtaagatggcccgaatgggtatgattgggccacaaagcgcgctggtgaaaatccttcttcctcggagaagtgtcgctcagatatgttacttgacgaagaggcctctccaaaactccagtagtcgaggaagaatttctcgccttcgttctcgctcattttcttcacgccgagagctggtcctgatgcgagctgggatgctatagcggcattgcgctgtatgacgatttttgccggcagcgatcgcgtgttagtttctttggattctcgctccgcagagggatttgtattttctgctaagaccagtgttgcaaactgtggcagtgagcagaacacggcgagggcgtggaggagctgcatactgcctcttgggtatcgcgatcaggatcgatgtcgagtttgtttaggctgagaccagtgaaatcagtcgggttgaaggctaacttgcagttcgatagttgtctcaaatatgcgtttgtttcactaacaaaagtagtggatggcttggttgggaatgaaacttcgagttgagttgatgcgaatatatattctcctttaagattcaatttagttgaattcgacagatttaatgaaagaggctttgtcggactaggaataattaagggcgcattgggctttctataaagctgcatataaaggtggctgggaatgcacaccgctacgcattagcttgcagaacagacatgtcaagatgtggagtacaacaacaagtcagtggaaacttttttattggctgatttcggcattgaagattattctctgtcttggtcgacgtggtacgatatcaagagacagactacttccacctaaccaaataagaattatttaacaccgacttcaaaggtgctcatatcatttgcaaaatcaaagactaaatgctagcagcacaccacagagtatggcagggtatcgtcagtaaatgacatgacatgggaggctctcgcacaggaaacacgccaaaaggtatcaacggaaatgaaagaaacaaaactaaggcctcaatgcaatgtcgaatgcagcaaacaaaaacaaaagcaaaaacaaatacgtatggaaccaatttcacttgcacttagcaataaatgattcgacatgaaagctcactgggtcggggatgatcagaccgaggttgcgtacaatacgggatcaagtagagggatgttcggggtcagctttgtcttcctcctcaggcgctgtagggagtggcttgtccgtgtcagaagatggagacttgggctcttctgcctcctctgcctcatctccatcctccggtttcgcctcatttccaccttcttcttggtcgtcatcgcctccgccctcgttgttttgctcagctgcctgctcagctgcctgcacagcagcggcctctgcttctgccttctccatctcggcattgcgggcttgctgtcgatcccaaacttctttacggatgcggtcgtcttttgcagtacgaaggcgctcagtctcctcgaagccaccgctcttcttcaatttgccttcgtcgacaaatgcaccaagttccttctggaaaagaccgattcgccgagtctcaagttccttctttcgtgctttctccgctcgctcaatggcctcgagtcggctttcgtggtttggttgcaaagcacgaacttcacccaggacaccatccttggctttcatgggatcaacagttgggtcaattccaagactcctggatggggcgcggacagcggtgctaccggttgcatttgtcaagacctgctccttggtagcttgctccaccagggcaaaggtctgagtcgccttctcgagatcatcttgcaagtcggcggcgagatcttcctgcatggtaagctggtctcgttcttcgcaaaccagttgtagctccttttcccagatcttggtccagacgggcttctcgcgagccaggaagtcctgcattttcttgatttctttcatcaccaagctaatgtcacggccgacaccttccaattgtcttggaagaggacgaacaccgcgggtcacaacatcctttcgaagatcctcaaccaaatcttggaggtcatcgacgcgagcgaccagccgctccgattcaccggcaagttctttcttaccagtgttgacgcgagcacgcccagcatcaccttcataagtgggagtggaaatgtcactagcaacggtcttgaccttgcttgccttggcacggactgcgctcatagaaccggtaatatcggatgtaaagttagagtaggtctgacgcaggacagccaaatcacgacgcaagctctgaagctcggcgatttgagttccgctacccacaatcgatgccttggaattccctccaacggcagccaggctagaggttgctggtggagcagcagacaaacgagcaatttctttggctgcttcaagctgacgatctgaaacccgctggatgatatttccttggccagcaagcgtctctttaacaccttcgaccaggaggcgtacgcttccgaggccgtcgtcgaaatgtttctttacctcatcgagattgtcaacattaagcactaacacagaccgatctttgacatcggtaagatcttctagttcatgtcggatgcctgaaattgggtcttggatataaatttctggcaaatcaacgccattgtcgtgggtattccaggcaaatttttcaataaaagcaagctgcagacgcccaatggtgagctctgcaatgccatcagggagcacatacttcttaattttgcttttatattgtaggaacagcgtcagctctttgcccggcgaaggttgctcagtagcaaattgaatagctgataacggtgttgcgatctcggacagttcaaaggtgtcctccttcggggtttgcggtgctggttttgcggactcaaaagcctcttccaaggttggcttctcctggggtagggggagaatcgaaggaggaacaatggtagattccacagtatcatctttcaccttatgagcatccggttcatttggcacctcgagtggtgtgttgtcgatctcttgtggctcaaatggaggcgcaggtggaggagtgcgttcttcttccacgacattcggaatatttgcgggtggaggagcttgcgcaaccttagcgacttcctgtaaacgattgttggatcgttgtcgtgtatgagtaaatgaacctcgcagacggactgcgttcaaggattcgcggacatcacgaccgcgattgggaataggagagttctgagtaggcaggacaggaacaccatttgtagatgtacctaaatgtttctggatctgataagcggagaatcgacgcgaggcacgtcgctcaagctctccacttctctgcaaagcccccaatgcgtcatcctccttcggcgggggtggaggtggaggcgcagaaaacccggtgggtgtaatatatgaaggtgcagtggtgttcgatgtgttggctcgaggggttgtatcattatcgaagggcgtgggttgagacagcatttgctgggcctctcgtcgcgatagttctctttcggcgtagttcgtcgtccgcggttcggttatcgaaggtgccgaggatgttcgagcaatggacggtggatcctccagcgatccgctgccataccgtctgtttgatcgtctgggagacgactgggatgttgacggcatggtggatgctgcagcttcatcatacagttgacctatgggctgcccactagcgatgcttcctgcactggcttgccgtcctggtgcggagcggccatcttcgcgctggtgccgggaccttaagcgagcttgcttcttcttcagcccttttaacaagttgatgattatatctcgaattctgggaaggtatctatcgaggctctgggaagatgcatcttgactaagagtgtcttcaagtatggtgcgcagcaggtctggtacgggaccgaggtctgaagtgtcgactccgatggcactgaaggcgcgacaggccaaattaaattcatagcccaatcgaacgtatacatctgacacgtcgttctccgatgcttgctttcgagaccattgggttaaggtttcgaggagttgttttgtcgcaaccaagaggtgcgtcacgctcttttcgatttgggatatttgcttatcgggctgtgcggtggggggaaacaccagttcattagccaccgtactgtaggcaattaacaggccgccatagtcatacctgagtcttgctagactgagatcgcgccgaggcggaggaactgcggccggactgctgggaagccatggatgtgtcggcactgccagaccccgagggtcgctcgggggatgcttgttgaaccaactgttcgggataagggaactgggctcttgacacgtctgaggactgcatgagtatgataggccaaatttccgagggagtgagaatagaaagtgagaaatagggcagaagcgagtgagagtgccaagcatgtgtgaagatgatgcccagcctcctgtcaacttggggccttaccgcacgcgaaccgatgatcagtaacggttcaaccccccaataccataaatactatatattactgtatagccctgtaatgatgtacaagggaccggacaacgcgttacccgcctattcaggccacagtaggtagttttatgtagctagtacatatatggactcgtgctattgatccttgacaattgcgaattggcctccaatttgatgccatcaaatcacatgcttatgctacctgcattttaagaatcaaaatacatcgaacatctacaaatacaacaaaacatcatccctcaccgcatccactgataagtacccgattgataagacccttgcctttgtccttcagctccactctggctctatttatattcctgcatgttgtacggagacacttatttgtgttgtaggatgatgggccaagtcatttgatcgtattcctacatcattatttagatctcctgtgtaggactcactgctttcttttccataggagcatgaatatcaaaccaagtatggtacctgctaaccctaatatggcagcccaaccaacttaacgcctaactccatcccagccacagaagtaaagtagacttcgacaataactaggttagaactgaagactggaacctaaggggaaaatgatcattcctgaagataggtgtttacctgatttaccaagtccaaaggggctaatcaacgttcgaatccaacggaggcacgaacagacattgggccatagccacttgatgagttttcttcaaacaactttaacaaatatagatcagcgatctaagctgtgcggcttccactatcccggtgatccgagacaggaactactacttcagacgctaacgatgttggctccgaatggtgagaataaactggaggccgcaaccctatattgtatgcaggtacctacctaggtatgtaactagagccccagttgattacatgcataagataaattcaacacctaactagttagttagttaactaactaggcacatggcgaaatataataatcttaatttgcggtagcggtacgatatatattcgacctaactaggtagcgggcctagctctgaccgttataaaatggcagctaagacaggaaagccccacccgacagtggaagttcccatggaaccaaatatgtatcgtgactctggacctatgacctcaggtatgacatctggagctagtcgacggatggtatatgtgtatatatagttactctactaggaagtgtaactgaagcaagatacgaagttgcataatacctagtatggacatatgtacggagtatgtatgtgttgttatttcaactatgacacaagacctcgggacgtaattgaccaacaatgcagttgatcgcgtaagatgatgcatacatcagtacatttggtacttccactactccatagctgctttatgcatcggaagtaaataaatcttaatggattcatgggttctgaccctagatcgcacaatgccatctttctacctttaaactctatggacatgggagctacctcagcctgacccgtactctgtcagtaacattggcaattggccgatcctagttggaggcccaatagcacagaatacttagaataacaataccgattgtccatttgacaatatccattgggacatgaagtcaccaagccagggaaaaataaaaataaaaataaaaagggtgtaacacacaaatacaataccatacgcgtgacttctctccagaatccctttcttcccctatcaacttgcaacaagcccatttctctttcttctatttctctgtctttctttcctttcccttccattccccttttttcatcctcctgccattggcattccggtatctccgcagtgtggtggttgcttatccttccccctcactttccccccagtcctatttgtgcaggcggtgtgttgtggcatcgtgcctcatcctagcggctttccgccgagcgaagttccacgacgcaagcttgccctgactgacatcaaagtcaatcaatggcctccgctcttaactctgtgccggctaatcacgcgtctggcaatgccagcgcgggtgcccctagcaccggtcgatctaccctgagatccagtaacagcacgaaggggtctgacaaccgacgacagtcaggcagccccgtcgatggcggacaacggtatgatcagcccttccttctacacaaatgtcaaatcaaatcctcgtgtaattccatatcctctcggacttgggaaactcccctttgttattatcctacccttcccttgtccggctggcgattgagctggtgagctctgttgcatgcctgcttcgagttgtgcgccagcaagagccaattgaagctgtcggattcgatggcagaattgttttgtcgttctctgcttcgtgaccagtggccactaacgcaagcatgttctactgcataggcgcacaaactcccacaaggcctggacccaagggaccaaccccatcactcaacgatcctcatacactccatcgaacggcaacatggcccaccagaaacagtctgggtccccgagacccaaccagaaggagtcaaacactcctgataaccatgcccatgaccgcctggtcttcttattcgccagcttcattgtaagcctagtcgcgccaccatacccgttgatcaattctaacctgctacctagggtctacacaccaccattaccaccaaatccggagacaagtttaccggtatcttctcttcgtcgaccatggagcctaccgaactttcgttcctgctcaagatggtccagcgaacctcgcaagaggcccaaccccgggcaaacggcgtcagcgatgtcgcaactccgtacataggctccgcgcccgagcacatcatgtcattcgatatcaaggatatcgccgacattgccgttccaaacgttaccacagccgaagtttcagccaaggaaccaaatggtacgggttgctttttttaatcggattagtctgtgcatatactaacctagtccacaggtgcttcccagggtttcagaactgacagtgatatctctggaaacttagccatgcgagagcggaccctgcagcgctgggaacctgccgagactgacgttgatatgtcactcgaaacaagtaacacttctgcgggatgggaccagttcgaggcaaacgagcgtcttttcggcaccaagaccaactacgatgagaacatctacaccactcgcctcgaccgttcggatcccaattacaaacagaagcaagcggaggcagcccggatcgctcgtgagatcgagggacaagatgtggacaactcccacatgcgcgaggagcgtggccttgtagcaccggatactggcgaccaagacgaagaagacaagtacagtggtgttcgacgcgaagacaaaaccttccctcccctgctttccggtcagccaaacaagtacatgcctcccggacgccgccaggcagctccccagcctgctgcgacgcccactgcacccaccaaacagcctgttgcttcccctatccccatcccatctccggccgtggccaagggagttgtaccttcacaccagcaagctgagccggtcgcatcgctgcagcccacagcagatatcgagcgaaagagtacctcgggcaagggcgtcattcccgcagtacctactgtatccgcagtatcagctggaaagcggcctgcacctgaaaatgcgactgcaaacgtggaggtagaggtgctggatcatttccgacagttcgcgaatagtgagaaaatgaagatgcaggagcgccgtcgcaaccaagcctcatatgaccgaaccatgaaactcaacgagctgctgaagttttccaagagtttcaaactttcgactccggtgccgaaagaccttgttcccatcctggccaaggaccggcaaaagcaggaagcaatcatgcaacgagggctgcaacagggggatgataaggcgataccgaaggtcactacacctcccacagaacagctacctgttcgtgccggacctagtggatctgtacccccatctgcaccagctgatcgtcaaaactacaaccgcacccgtcagggttatccgcccactgggcctcttgctggtgggagattccctcagcaagtagttccgcccggacgtcctggtgttggcatgctcagccatcgtctagcggacaatctgcagcaacgaaagggcgcgggaatggggcctgtccccactcctcttcccattcaagatgctcgtggaacacccactggtcctgccagcgaccagcagagaatcaccagccctgtcaagtcacaggccgggtcttccgcggcaaccaagttcaatgtcaaagctatggagttcaagccaaaccccgcagcgagcacttttacgcccggttcctcgggcgctgctgcaagcccacggtctttctctcgcaaccgctctgtgtcacgcgccacaacgccaactgcgttcttcggcccaaggaagccactgcctgtctctgaacgaccctcgatcagtgatcagttcaatcccatcaagcgcatgaagaaggagaacgcagagactactgaaaggttgattgtgttgaatggaggtattccaccaccctacaagactttgccaacttgggacatcgcggatggcagcgaagataagacgtacgatcagatgttcaaacagcctgttggcgtgccgacagtatcgcctcagggtcggtccgcctcccacaacaccaatattccccagcagcatcagctgcccttccacttccagcaaggtaacccagccatgccgccatcttctggtcctacgaatggaccccatggtcttcactctcagggcccccatggcccctcccatgtggatgatcatcaccgcatgcagttgtccgcctctaactcccaggttttcccgtccccgcggatgcaacatggatatccgtcccctatggcttcccatgcccagctttctttcgcacaaccggtccctcagttttacggtggcccccaacccggtcacatgagacctttccagggtggtgggcctcagtttgtgaatggcgctcctatgatggtgcagcaggtctcaaatggaccctacatgggagtcccgcagggcatgactccgtataacgcacagatgcccatgtactccccgaacccgggccacgcctacccccaacatacacctcaaccgcatagcgggtacccaagcccgagccgtggtgcaccgatgatgatgcaccagaactcgcaatccggacagcctcctcaatcactaatgtttatgcctggccaacccggatatccccagcagtccggacatagtgagtgtggctacagtcccccatcaagcaactccagtttttaaccaacccagtgcctcccaaccgtggcaactacccacagcagcctcacttttcctcaagccctcatcaaccgcatcatttcccacctaaccagcaccggacacccagcaatggcttcaaccaaatgcctcaattgccaccccaaatgtctgccaataccccagccacaacccctggagcttcccatccggccgaggcaacggatgaaggaaaatgaactacacgaatcatgaagccgtgagcggccccctcaaatgatgctacatcttattgcttagctgtgacttgtccgtgctctgcattatcggcaaccgccaaataccccggttactcttccatgaccgatcctcatctgttttccccgtcatcgacgcggtcttcaaaacatttgaattctgcggtgaacttcatgtggtctcaagacttgctcggtgagtgaacagtttcgtagtcttgagaacatgcgagcaacacccgctaaccacgtgatcagacatgacagatcaatctactagttgtgcctatctattttccagatatcgatctggtggtgtacatggaacgaatttctaggcgatgaacccgttgaaatcgatcacttgatatccgacctagctcatcgttgtatgcctactagtgcacaacatctccacatacgtcatcgtcgagttgaagtcttgagggtttctccatacctgagatggcctcttccttctgattctctcttatccagtttctttttttttcgtttatctcttctcttgctttcttctcggttgttggttggagggctgtgtgtccccttggtgggctcactggcctttctacctttgatggagggaagtgaggtctgcggtgggttgcgttacggcatggagacaatgcttggtcggatggtgatgtgggtgaaggtgatcggtctgggcgagcaagcggagcagtgagacgtggttgaagatgtgggaacttgataatagagatagctcgacccatggccaactggcaatgaaatggttatctcatgaaaatttctccatcattctgtgtagtcggccgctcatgcggtcgtgtcatgtctgtttcagatattctattcctcttctcggttttatagctggacggcaagcaaaggagaaaaaaagatgtgcagacaattctctatactatattataaattttgaccaaataaaactccccaatatcaccacccgtatccatattcaacatacaaaccaaatatcgggaattctagataactgttacagatgtcagcagctgcaaatgacctcatttcaaataaaaaagtagtcaagtacaggggaaaaagtctcctcaggcttaatttcaacagtgtcatcatccaagccacagacaccagacatcaacccaccgcggtgctttatcccattgcaagctcctctgaccacactctaggcataaacaagcctcagaacaaaccccctaaaccccaccaagcatcacaaaaaccaaccacgtccagcccacaccccaactaacacacctctccgtctcccaacttccaaacccccacagcaacatgcccacaccactctccacagcagatgaaaaagagaaaaggaagaagagagagaaagagtagccaggaatgacaattcctaggcaatcagagagaagactatagagatgtccgtatcccgcaaagccaacagaacgccgccagcaagaacacgtccaaccccaagccctcgcaaagaacaccataagaatgccatccagccacccaagtcccctcttccccctaatcccgaaaccctcgcaccctttacgccacagccattggtcgcccacccgtcctcatggaagcgaagcggacacggcaaccccagatagcggcgccacctccccgtttcccgcactttctcgcactaaagacccgacaccgtacacgctatcaccctaaccctaggatatgatcccaaggcggacctcaacaatgcaatactgctatatgcaatgatattacagtaattgaaagcgagatctcggcaatgagcgcgcaggcgccaagcccagctgcggccatgcctcgggacggacggaaatgtaaatgtacacaatgtctcccatgatccaggaccaacgccgctttgtccgacgtggccgcgagccatgggggtgctggctaggatctcgatgctgctttccagcaatccgacgggagacgtaagcgttctgctggaagagtggggggaatggtgttatgtgaagttggttatcgagagtgtgatcggaggagggtgtcgtcgtggtctgggcacagctctatggtggtgtggcaccatcatggctggtccaacagacagtagtctgctggaaagagatagttgattcgtgcgcacgaggtggtagctcttgaggtttgctcctagccggtttgtggtattgcgtgggttttagaacttgcgggagtaccatcggttttgctgggtgagtcttcttttgcggtgttgtggtcatggtctgaccttttaccagagttcgcatcattggagagggcgacttgcgtcgctggttggtgtactttgtgtacatgcatgggaaagggactggaaaacttactgtttgatcattagggttgtgtcgactggtatataggtaaatgtggaagaagaagataagtgctgtagcataagccgcgtaagttccagtgtcatttggcgacagaattagacgcgtgggacagtggcatggaggtgaagaaaaagaagacaaagcggagctttatttatatgagcacgtgttggcctcagacaacggtgtttatcacgataagggctatcagtcacgtgatttgggtgggtctccgataaggcgggggtgaaaggagtgtgttgtttgatctgccttgctatctgagttacaagcacactgtatctgatcttcgatcattttcagtcactatctcgacctattgatctaatcctgacagccgactgaatattgaacctttggccattggccgccccgactcgcgcaccccggacaccccaaataaaccccgacctgctacatcggtcacataacagccatggatttcctgaagtcagctatcggatctgccatcgcgaagggcggaggactcccattctccctcggtgacagagttgacatcggtgattcggtctgggcactgcacaacggtacgaaacgggtacggtggctttttggttccttcttccatgcgggacgagcttcaatggctgacgatgtcgtggaacatataggatgacggttctgcgtgcagtgtcttcgcatttgatgttaatgcgaataagtcgcgccttcctcttgcgaaaaatgcagtgcgcaagtctagaaccttgcggcatcctggtgttatcaaggttttggatacgattgaggtatacttggctcccggccctttggtatgaatatgagattatggcgcagacgcttacgacttgacagacggagcacaatctttatattgtcacggaacgagtcgtgccactcagctggccggtgaagcggaggagcttgagtgaggagacggctaagtggggtttgtatactgtggcggtacgctattcttgagagtttgatatcatagcattgctaatgaggatttctctggacagtctactctcaaattcatcaatgaggatgcttcctcagttcacggcgccgtgcgcgcatcctcggtgttcataagcgagagcggcgaatggaagctaggaggttttgaaatcctgagctctatgaaggaggacgatgcgattatatatgtgagttattctggctcaggtttatccagaaagtgcccggttgatgccaaatactgactctatgcatagacgtacggaagtagtgtacccgatgccggtcgatacacgccaccggaagttgtcaaaacaggctgggatactatcaagcgcaaccctttgacagcagttgatgcctacgggttaggcatcttgatcttcgaggttttcaatgggggtttctcaggcagcgaccaagctggcaagacgacgaacattccccccagcatgcagcaaagctataaacgtctttgcaccaccaacccgaaactacgactaagcccggggcacttcgtggaccagggaatgaagcagggtggattcttccagacaccactcattcgaatgactgaagatatcgacagcttggggctcaaaagtgacgccgaacgtgaagaatttattaagtacgtatattctcaacatgctgcatataattatttcttggctgacatatcacgacttgcagtgagcttgataatctttctggggacgactttcctgaagaattcttcaagatgaaggtgctcccagagctactgaagtccgtcgagtttggtggtggtgggcctaaagttcttgtagctaccatgaagattggagcaaagctgtcggcagaggaatttaacgccaagttgactcctgttattgtccgcttatttggcaatcccgatcgagcattgcgcgtctgcctcttggataacctgccatcaatgatcgataatcttccccagagggttgtcaacgataagatcttccctcaaatggtaagctataagattttgggtaatgcacggtttactaacatgccatagacttctggtttcaccgatgttgctccggtggttcgagaacagacagtgaaggctgttctgactatcatcaacaaactcaatgataggattgtcaatggtgaactcttgaagttcctcgcccgcactgctaatgatgagcaacctggcatccgtacaaacactacaatctgtcttggtcggattgctaagaacttaagccaaagcgtaagtgatttatcattaatgttggatcatgtcgctgacattacatatagactcgctctaaggtgctgattgcagcattcacgagagccatcagagacccctttgtccatgctcgaaatgcaggacttttggctctgtccgcgactattgatgtatttagcgaggaagattgtgctgttaggattctacctgccatttgccctgggcttttggacaaggaaaagtgagtaatgcgctcggtccctaactaatggatagccctatacttacagttgaaaagattgattcgcgaccaagcaaacaagacgtttgatttgtatgtccaacggacacggaaatatgccagcacgatgccagataccgtgatcccccccgccgcacctgcagaagtcaacaaacccgatgcgcgtgttggcacacccaatgataactcctgggccggctgggctatttcttcattcacaaacaaaatcgcagctgctcacggcgagattgaacccaccgccagcgctagcaagcctgttgattccgatactgctcgctcggcgtcggttcctcgtcctgctaaaccatcaccctcaccctcaaccccgctcgaaccacgaaaacaagcactccgtcccacagctcagtccatgaaccggtcaatgtcagatcgcccagccccggtggtccacgacgagccagaagaagaaggcgatgatgtcttcgatgcttggggtgctatggacgacgacgaaaaagacgacgatccattcactgccgctgtagcttctcccaaccccagttctcccgtcccgtcatcgacaaaagccccagcggtgccctacgatgatggcggcgaacccgattttgccggctggctggctgcgaagtcacaaaccaaagcaaaaaatcctttgccaaagggcctagccaaggccgcttctaccaatgccgttaccacacggtcgacgataagcaacgccaagtctcggaatgtggtttcacataagaagattgatactaaacccaaagatgaggagggcgatgattggggagatgcatgggagtaatcgggaaacacctcgctctccttttttgattttccatgtccaatcccgtctaatgaaagtctagcgtgtcaatatcccataacctttgcatcgaggcgtgatcgttatatttgaactcaaactcagacaaaagatgtcctaaagatgacgctcatttgctaaaattgacgttggaatgtaactagcacttaacagagccaaccaagtctcaaaacagagtgtcaaatataaaattcgacttccaccagggaaagctccttaatgaaaaatccccgttcaccaagtcttcagtatctccccagcaacccgttctcccgagctaatagccccatccatatacccaatccacctcagtgaagtctctgtcccggcaaaatggatcctcccaactggagtacgtaaataagacccatactgtgtcaaaactcccggcggcatgaaagcactggggccaccacgggaaaactcctcaagatcccacctctgaacgaggatatcggtggcattttcaacgcgcggaccaaagagattagcaaaactctgcttgacttgacgctttacctcctcctcgctcgcagtatccagcttgcgcatctcgtccgcctcgatgaaccccattattgctccgaacgagtcatccgccggcgagttgtcgtatgtcactcggattgccccgatgtcgctcacaccttctccgttgagtccctcatcccgccaccaggctgtcgggaagatcgcgatggctttgccaagtgcccccatgggcatgcgctggtttaactgatctcgtccggctggtagtaggggatcgaatatgatgtggcttgctagaggtggggacatggcgacgacaacatgtcgggctgaaatattgacctcatctgaagagactagatagcgggattttttgagctggactttgcgcacgggcgtgttcaggtagatgttttgcgagccgagtctctcggcgagaagtgttgcgagtaactgtgttccaccactcacccgactatcctgtgcacccccctccaccccaatgagacggttgatggtcccaggccctgttttatctccagcggcagctatacaccacaatgcatacagcaaagacggttctctcagttcggtcgacagtatagctgggatggcaatatcgaggagaacgcgagagtcggcagtggataatcgggaactgacgtatgtttctagagtcattgaatccagcgccgtggcattcggggtattccatggtgcttctaggtcgaccttgctcgctagggtattgatgtcgttcatgaagaatgcaagttcaataagggagcctattcccacgggaggaataccgcccaaagtatcttgataatggtgaaccgtgttgtttcgatagaaggttgaatttcccgtcgtatatgtcttataggttgggaggccgagttcggccgcgagagccaaaacgcggttttgtgttggtccaacatattcgccgcctagttcttggatattctttcctgtgaggttgaagttgagtacgcgaccaccaactcggtctcgtgcttctaatatgacgaaggatttgttggccgctgccaggtctttggcggtggagagtccggataggccaccgccgatgatggcgacgtccactttggggatgaagcattctgcaaccagtacatggcaaaggggaattgctatcacgaagaggtgcattgcactgaaggatgacctgcagtaaattatccgcataattatccgtgtatctgatcgatggactgtttgaagtattactgagctatagcggttttttatatgtagggatttcaacggatggattcgatttatatttgctcattttaccaccgactactacccaaggttacaaagtacaacagaggtaatgaagccgatttgctcggcctagaagcaatgttttgtgattagagtagcacgagcgacagaagagcgcagagcagagtatagccctgtaggtgtagctattcaaacaacataaatgccagtaaaccttccaatatctccctattacgttattgttgctggcatggatattttgtattcttcttccgaaatcacatagcgaacaacatgatagcgacacacaaaaggaacagttgatgtctggcgctatatctccgtctccgagccttcttccgaggattcgcaggattcgtcttctgatgccgatgaggaggattcattacttgttattccactcgattcttctggggtttgttcgctagacgaacatcatcatgggtcgatggggatggcgttagtatcactgttactcgtccccttgctcttagctaacgtctatattaggtctgttcgaaagcgatcaggaccttgacgtggtcatcgacttgaccgacagtctaggtatcaatattgaccactgggaacacaacctagctgcaatggttcatcaaacagacattctggcaccagcaaggtcaattgccctctacagtacccctggatataccgatttgctagccaatgtcatcgtcccgtacttccgccagcagctcgacagtgacaaccttggagaacggctgttcgctgccagtcgcgccaaggaagcagacacgggcgacctctcccaagacgccaagtaccgaactatcattctaggtgctgtcatgatccgagctggtgctcgcatcaacgaagcggatctgcagcatctacgtgacctagtgccccaaattaacttcgactcgcgccaaatactttttgaataccatgggttcagaactccaggaaaagttcagtttctggctgccctggatcactaccagcccgtgttgcacgcagcttccaggagcctaggtgaattccctttggaagactttggattcagacccttcatgctaacgtaacgaccctaatagctgcttcacgtgtggaaaaatcgaggaggatatcggtcacgagcttcagcaatgcaagatatgcaaagttgcgacgtactgcagcgaggcaagtaggatacaagctatctttctaagttgtatgttcatatatattgaagcttcataggactgtcagcgtggccagtggcacaagcaccaagtgagctgcttttccttgagccaacgccggataataaacgtctgatcgcaccttttgatggactccaagaatactggggtaaatattctgatgtttctagttctcttgtgctagggtggattattacctgcatgtctgcaatatcagggatccaacattgcttgacatatcgatcggtgaggattgatattctcttctagcgattgattcggtcaatggaagttcaaattcaatttacgctctggagtcgtcctgctagaaaatatgcgccagcacgctacaaatgtagtagatgcatgccgtggaaaggagatagacctaataatatagacgcaaaggtcaatattagttggttcgtacaatttcttgctgtcctcgtacactccactttctctcggaaatcagatatctgcataagaattatgcacatccacttatgccgattatgcagcggcaccctcactccgccgatcccgtctttccacgacatcaaagcatcacacccgatgtcttccaatgagaagaaacgcctccgagatcgtcgctcgcaacagaatctccgcgaaaagaagctgcgacatgtagcccaactcgaaaaacaggtgatacactgcgagcagcatcacagcgaccaaggcgtgcagcgccttctccaagtaatcgaagggctccgcaagcaaaacgaaactcttctcaagcgccaaaagagcttgaaatcactcgtcaactcctgggagacagaactggatgagccagctgccaccggtgattccagccatgacttgtcatctctgtataaggagctgagcaaccgagaagcccgattctcccttcaaacggatttcaacgaatcgataccccagcacgggattagcagccttctaaacgctcccctgcccgctgtgtcaacatcaccgcaaatccgatccccatctctagaacctctttccgccgaaaccacgcctccgtggaaccaaatcccaccacacactgatgacttcagcacacgcaccatgatctcctgtccgtggttcatctacccagagctgataatcccatgcccagatatccccagttcccctcttgactttctgtacggcacgaaaacaaacccgctagcagatatgatccacacggccctgcaacgccgcccagtccgtgatccggagcgactgagtactggctggctgacttaccacttctcgagatgggtcatttcccccagcccggagacttatggtcgactccctgtgttccttaggcctgtgcagggtcaaatgaccgttccgcatccgctcgttttagatttcttgccgtggccaaggataaggctgaacctaattcggcgttggcatctgtatagtaaggatcgggatgacctgttcgggttcatggcttgttgtgttaagattcgatggccttggaatgagacgattcttgaacggaatgaacagaacgagttgtgtattaaaaaggcgttttatgagatgttcatgactgaaagtgggtgggggcttacgccggactttattagacggtatcctgatcttgtggaggggatggatatcaatcaaattgtgattgaacttttctaaggaatgaccctgttcatgtacagaaattcatgttctattatgctctattctattaattgtgtataggcaacttctatatgtgggtcgttaaacatcatcccgatcatgggaacagacaaggccgatgtggagcgaatagtatgcccttgatagtagcagctcaatccttttcaatctttaccatcgagatcaataggccacttctcccgaatcaccttgccatacttgatgaagacaatagggactgggatgaatgccaatgccaggaacccaagcaacgagttcccccacccaagacccagattaccgaacatcttcggcccagcaagcgggagcagagctccaaccagggagcgagtcgccgtcaaagtggcattggcggacgctgcatatttgggatagcaatcgatgatatatgtctggataggcatatacacgcccatcgtgccgactccgaaggggaacatgccaatgataggcacgatccaaaatacgtgcttgtcggctgtccagccgtaccagaagaagctgattggaaggatgcaggcgaagataatcatcattgggagacgcatctcgggttcgaacttgccgccgttctttgctgtagctgacatgaccatgcggtcgtttgtgaaggcgataattgcgaggccaccgataaaaccgaagccaatgccgagatatgcaagtcccgataggccaacggagaacccgtatttctgagtgaagacgctggggatggtagtgaagaagaggtagagaaggccgtaaacgaaggactagagatgaaatgttagtaattcgcatttcgtctatcacgaccgaacttggactcaccatataaagacacagaaggaacacaattggcgacttgacaaacagcaaaaccggcctcttgaaactctgcaccatggtctgtcccaaagtaacgggctccttatttgtgtcataagcactccgcaaatccattcggcccgtctccttcacgagtttctcggtcttccagcggataagaacttcggcatatgtctctttgttcagaaactcaacccccaatgacacgataccacccacaataagcaatagccaaaacacccagcgccagccagcttcctgtccgaggaatccacccgcgataggcccgaccacaggtccaatcagtggtcccatagcccagacggcggttgccatgccgcgttgctcccgggggaacatatctgcgatcacacccgcaccgagtgttagacaacccgagcctccgattccggcgaatagacggcagacgatgagggtctcgatgctgtttgctcgtgcgcagccgatttgccagaccacaaaaaaccaatttgcagcactgaggacgacgcggcggccgtagacttcgctcataggggcgagtagaaggggaccgaactagttccgacatgttaagacgggttggattgcataacttatagggtgggatgggctcactgcatatccgaggatatagatgctgacactaaaagacaagattgtctcatttgtttctccgaactccgctgccacgtatgagatggcgggtgagaacatgctcgaggccagcggagagatcagagtcatggcactgatcagggcgagcaaggtccattttttgttggccgggaagttttgggggttattaaggtcatcttgtccgtcccagcctactattccgcagctgaggtctgtttctgggaatatttctgtggttggtgctgatgtttcggtggtttgcctcgttggctgtttttcgaggtcatgtgttaggtttctgacgctgtctccttcgttcagggttggttggtttgaactggactctttttgaagagtatgcatcatgaatcacaagtgtctgtggaataatgtacaagagaggacgtgcttggcatgtgagagtatagagcagtatagtggaaaaagggaagaaccgatcaggtataaaagcaaaagccccaagacgatagatcaggctattatcagcgcgccagttttatccgatatatccaccgagatatacttcattgctgccttatattgagtcataaatgccattatgcttataaaagggattcataaatcgacaagcatcgcgcaatgcaacgagtatggacaatgtgatggcttagcgatgattcagtgctccacttctattgttcattgaccaataaacgctcttcagaatagccaatctccaggcgctgaatcattgtttggtgcctagtggggccactctcctctcgcatagaacctcacgtttatttttatcttcttgatcttttaatgcgcataattcattcggctcaggaggttgataacttgcgatttaattggtaaaatacaaggatttgatagcatgtgtctcatctcggacccctgtttgaaatagcctttggaacacagcctccatatcatgttcattgttccttctcggcgtcttcgaacacacttcatatcattttcacggcggaatcaagcacttctttgcaggacaagtaggcaccccacaataaaaggtagccatgtgttgccatactcttgtgcactgtcgggcttccatcgttcatcacatcatcattcaataggcatcggatccatacactccaggtagtccaacacatcgaggtacacttcttcaaggtaagctttggtaacatcctgggcgaagttgtgcatgttcttcaaccgttcatatctcagattgacaaaggctgttcccacatcactctcaacttccgccagcaagatcagcagcgggacaaatggcggaatccccatcttcatattcaaagtgtgggtgtaatactccatcagacggtgaacaaaccaccgggcactagagtaatcacatcgccggcaccgaatgagattgaacagaccgcttgagatatcctcatagtcctgtgcgggactgcgggtataaggcccaagaatcttctcggcccccatcatgaactcgtctgccagttcggctcggggctgttctttcgcaatcatgcatacaaggatcggattcatgttccacgctagccagttgcggacctcgatcgacatctgttgccatctcctagcattgggcgagtccctgtaagggcgaacgatgccagaatcaatgagccgatgaagtctgtgcactttcagaatgtggtagatgtcattgcgccaggtgaggtagtcggaagggtgtttcagaggacagggaaattggtacagcgtaaagcaagcgatttctggcagctcaaatgcctggtcggttggtccagtctgtttctcaaccagaagtagagtcgaccaatcgcgagtgtgctccgtcgacatcttggcgtatggttgtaaagatctttgtcgaccgggtgccccgttgttgtaaagtgagaggagaccccgtctggaactatacacaaacccaccatgttagctcatatttttttttcgaaatccttacaataaagactgaaggcttactgtattgatcaattgagtaaaatatctgactatgccacgggggcgtgtgttggtgatctgcacacctctcgctgtctttcagtcgatagccgagaatcagaggataacagatttcccacaattgagacgactaaggagccctgtagaccgagagaatctttcaaatgctgagatactgacagttgtatctgtctgtatgtttattaaaaggaattgagtcgaacagaagagaagtgaagggaggagaggatgaaagtcatgaagggtctgagtatgggacccagaatatactctcacttacgagcaatcccacatgagacatagtttacgcgggtacctccgagggcactacgtacatttaatccaagaataaatctactgtcactagcagtggacttgaagcagtattttcaaacgaagcagcatttcagccatgtatggccgatgagcatgtctataagtgaattgtatagttcctcggcctcaaccaggaccaccaacaccctgctctttcggtgtgaatatagttgtgttgatagtcctcttaatataagttctttcaatcttgaaagcatatgtattccgacaggaagtttgcatatgtccacgcagaaggttgttggcaatcgataggccttatcgttatcgtccccgccaatctcctaaccttgcccggtggaatgtcatggacttcttcactcccaagatcagcctttctctcgtatgtaccccttcatcagggtctcagtataccctttgtcgctgtgagtcattctccgacatccaggtaggacataacgtctcccaaatataattattgtacgctgacagaaccccatttacagtattcttgctgccttccaccgcctctcaggtcctcgttatcttatcacagaatgggaattcactgtagcccttcctaggccactatattgttgctacccttggatattccccggccgatcataaccgccttctcaaaatggaccaagaggaggctccaccacccccgtactcggccgtcgacccattactcgcacctgcgagcagtcggaacaacagctcttctcaggccccaatagttcctggtgcgattgtctccccaacgcaggatgccagtagctctcgtgtcccaatacagccgacggtcgtgccgacgcatttcagatccgccgctgcgtactttgaggaacggcttccctcggtcttggacgagagccgggatcttctgcaacatcatatgaccatctacccccggagccaggctaaggattttccacgacggccacggtgctgggcctctcgattagatgaggttacccagcaggactgggatacattcttaaagtatctatttccgccgcaattggggctcgctgcatcctctcagcatctcccacgccaattgcgagcggagattagacgagaccgcaaagatcgcccacaggagactgatgagcaacggaaagctcgaatcgcggccgttgtcgccgaatggaacgaatgctttttcgagctccgcgctacccagattgtctttgtctacgtaggcgaacctgattctgcaccatcgtccgctttatgtccccgatgctatccagcggcaacgggttcgatagatggccagccgattcgaaattcaaatgctccgtcacccgtgcctgggcagcacgttccttctccgactccttggtcgatgcctccctctatgttccataacccccaagtatatgtgcccccatctccatatggagtatatggtgttcctccataccctccccccatatctcctaaccaaccacctcaatactatacccacccaccacaaggcccatggcaatggaacaattggaactatacgcagcagcaaccgcagtaccccaataatggcacccccaaggctggatccggtgggtggatttcacagatcgcatcacaagcccagaaatatggagagcggttcagcgaacaggcgctacaatatggacggcaggtcgaggagcaggctattgcacatggccgctggattgaggaacaggcaaggcttcatagtcggaaagcactaatggctggacctccatacggtggtgggtactatcctcggccggcctgggataactcgcctcgtcccatagccaacattccgttgacacccattcaaagccctagccctgtgacaagtcctaatccgacgggtcggcctgagacaatcgatcagattgatagcaataagcctaagccctctacagaacaacttagggtagagccacccgcgaccgaacatactagacgagtatcggtgagctccgtgtcatctgagtcctcgttcagctcaattgactccatctcgacaacatcggacctgggcgcttcagaccttgccacagtgcgcacccaattggagcttctagacgatcgtcatgatcgggtattatatgacgccgccgtggacctccgccggcaactgtcggtcctgcaagagtcccgccgagaagccaagttctccggtaataactggcgagcaggtttcagccagagccaacaaaacagccaacaatccggcgacgccgactggggtcgctgggactcacctgagcagcagcaacgcaactcggtcgatagacgcgccatgaaagaagaaatgcgtgccactaaaaaagcattccgggacacgctgcgccgagcacgagacgagcagcgtgaacgcaaacgcactcgacgccgccaggtccgacaagctcgcgctaatgacagcgacacggcgaatcatatgccttcccagccgctagatcagcagcttgggacgttgcggctggaagattcgcggcaatttaacccgcctatgcctccacgtccagtcaccacacaagcacagcctagtccggtttctacaccgaatagctcgaatgtcggatttggatttgcttccaattccctctcccctgctatctcgcggctaagtatgcaggagtcggcacctactggagactctggcgcctttgtgaagaaagggaagccgggtgatacgtcaagtcggctaaaggatatgctcttaccgcgcaaggcgagaaagcaacagccgaaggacgaggatacgggaagtaaatgatttgcatatgtcttctcttctctttggttttatcttatttggttctattttcagcgtggtgtccaatgttttcttgggaggacggcaaaaatgaatttgctctgctcaatgcatagttcagatctcgaccacatcgaagtcgacgaagttacgattcacattgatacagtacatttgcgaaaactttatatatcgaaatcaaactttttcaaaaagatctcttatacatacaaagagcaataacccatgcccatttgagtctatcttcacatatcctctaagccttcgactcattcttctcaactaaatcaccaaccccaagtcctctcccaaccttaacccgaatcatcttctccgcatccttcttcccaagctccccaacctcttcgccctcatcctcgttcccttcctccccattcttttccttattattctccgcatcccgcttttcaatcgccttccaatcaagccacaagttctgaagattcaagcgcatagcatacgcatcctcgccgtcggcatagtacccgtcctcgaccttctcgacctcaaagccaagcgtatcgcggtacagtcgcagcgcagcaatgttcgacatgcgcacgtgcagcgagacgaaatgggcgcggtgagattcagccattgcgcgttctgcaagaaagaatggaattagaaaaccggactgtaattatatgcgaatatgcagcgtttgcaggtcgtttcaaatacaaatgcaaatgcaaatgaaaatgcaaatgcaaaatgtaaaatattagatataaaatcaagaatatcactcacgactcatccgcatcaacctctccgcaatccccaaccgtctatgcgtgcgcataacactcagactggtaatatgaccatgctgattcccgtccgtaggctcctcctccatcttcgcgagcacgtatccaacgaccttgggatactcgcctgagatattgccggccatgccgacgcctttggggccaggcttgtgtcccccgcgtggacgcacgaccgcgacgaagcttagctgcggccaggtcagggcatggtacaggtagtattttaggaagtagttctcgggtaggttcgttatgttgcaggtttggattgaggggaggaggtcgatgtaggagggatagctgctgagagggacgatgtcgaccattttggcggttttgtgcgcgcaggcgagggtttgtggtggtgagggggtggttttgggtgagggttgatggtggagttggtttgcggtgcggtggggggtggtcatgtgatgtcggggagggagctggggatgtagattgtatgtaggttgtgatggggagggttggattggctattttgctatggtttatatgttggttttggttttggtcgtctggaaatattttattttgatttgttcagttcgagtgaactgcgcatgtccgcttgttgaccatgatgtttatgaatagatcgaataaactacaacattgtacacaaatatgtactatatcaaaatcatatgcagtacaatatatgtacggccaaaaaaagaagaaagaaacctagcgccgacgaccgatccggtcatgcacccaaagtagtcatagatatcgtggaaatcagaacgcagacatcaccacctgcactcccactgccaccagaagcaccgtcgaaataccagcgatagagacctcgcgcagcgcgccagatgtcttgccacagcatttacggttgtaagtgacattgttcatctgggcagcgacctcgaagaccgagccgttgaaattgccgtaattataataatcgaccagaaggaagttgggaggactgccccaggttgctgttcagagttagcaacgcacattaagaatcaaacacatgtcaacttacagttacattccctggccattgcgcctagactgccactaccgttcacagcattggtctcgtcaatcgaagcagtattgggaatcaacaagctcagagagccgaggttcagctgcaggttcaaattgtggttggccatgtacatgcggttcttagcggctgtcacagacagaccgggtgggcgttgctgcgtgcaggggaaggtggggtcagtaggcgaaaatggcgtctcccacacctgcgagaactcatccatcagccatgggtacgcggtctggttggcttggtagtccatgaagaagactgcacgcttctgcctgaggatcatctccgaaagtgtgggccagtcgtccaggcccattgggaccttggtgggggtgtatatgaggtccttcagtccggagttgtagattggggtggtgaagttagcgggcgagacatagtcgtaattgccgatgatgaaggtcaccacgtcgtatgggttcttccgcatccacgtgttgacctcgactaggtatgcttccagtgtgccgacattgagcaattggcaggtcgtgtggcacaagtacattgtgccgttctcgtagtgcgtttggaattgcactaatccacaggttaataatcgcttacttctcaaaaggcaatgcaccgccgcttcacttacgcagccgaattccatcattcaattgtgttgtcacatccagtacctggttggcggcgacgctgttcttgcgcacgaacggactgttgtgtgctgcgaccatggtaatgttggagtacttcctggcacagaactcggggtagtcgttgcaaggtcgggtgttaacgacaggcgcttgggtagatgtactggtcctagtcgcagttgcgttcatgctattgttcccgatcaccgtcgttcctccgcctccgccgcccactagcaaagtcaaggagtcggaagtcatagtgactgcctgcgtctggttggaggcggtcatagtgccattgtgttgagtggtcgatgcaatgaccgacttgtcgccatcacccagtgtgattgttgtagtgaggtcttggtaggtaccggagggaatggcgatgggagtcgtgactgacacaatggtgggttcatcggtggtggtcttcccggattccgtagatgatttggtagatttggtggattcggtagattcggtcgattctgtagattcggcctgggccgcggcaacggcgaggaagccgaggacaatagtaggccacctcatcctatgtgatatgaagactctacgtctccaagataggaggagaaaatgacggggaaatactccaacttacctaatcggcacgtggaggctttgacgatatgacgttgaccaccaataaaggagaatgatgggccaattgtatttttatatttttctatcactttaggggggcgaagtggatgatttttagcctgggtctcgtgccgattgctgcctgttataaatttagtccttcttatacttttgtctcacatatagcggctgcactattattgtatattgctctatattattctactaaatctgcttattggctgtggtattgccctttccttgcttttcagctatctccatacctctatccatgccttgatgaactaatatagtccgaatgatcgacagcgtaggccaggggccaacaccgctagtgtccagccaccgacgatctcgtggcagacgcgacgatccgttgaaatttcttaaattttgaaactaatagaccgaataggcccaggaaaccctaggaaccctgggaaacccaagaaatcccttttaaaagctaaaaacaataaaacaatccaatcccatttgcctggaggcgatcgggagatatttcatggcctaacgtcatccccggagaccttaggcaaccctaattttcctcatctcctggggattttgggactttctctccttttcactcatttatcacatttctatcatgcattggacggaaaatggcaagcgaaagcttcctttttttaagtccactaccccaattgaccgccagcgaaagaccaccgttcgttggcaccgcctgttacggtcgctgttgtacttgatcgcttggatctttatgctactggtagtcattggcaacatctctaacaggcccgtcctacgcaatacctacttcctctacctcgatctttccaatattattcccgtctctattcccaatgccgtccttatcaactctatcgcccagactatcgggctgcatgacttctaccaggtcggcctatggaacttctgcgaaggatacgatgaccagggcatcacccattgctccaagccggagactctctatgcctttaacccggttgagattatcctgaacgagctgctggccggtgcgacgggtacgttctacaatatccccgcacccaacgactcccctggaatgcgaagactaacagctacacccagtcgctctcccatccgacatcgaaagcccattaaaactagcccgcactgcctcccactggatgttcggaatcctcctatccgcagcagtcctcaacttcgtcatgatcttcctcgccccgcttgccgtgtcctcccgacacccacggagcatcaaagcctgggccgcagaatacaacaacggccacccgcccgcgggcaagccaccccaccgccgatgcaccttcatctggttccgtgcgctgcccatgctgattctgacatttttcaccgcgctcgtgacaatcgtcgggtcagccgtcgcgaccgttatgttcgagatcttcgccaatgtcttcgcaaccgccgatccgagcatcaacatccgggcgcatgtcggtacccagatgatggtctttatgtggatcgcttcgggtttcagtttgttcgctttcatccttcagcttggctcttgctgcgcggcttgctgccgtggcggcaaggcgcgcaagcaactcaagtcggagggtgtcaactggcgcgagaagggttctctttcccccgttgcggctgaatctcgcggtgtctcgtcctgccgagatgctgctggtctccccgaggatggttccgggtctagtggtcatgcgttttcgaatgaacatgagcggaagctgatcaatgggcatgctccgacccagcatcattcttcgactgaacctcatgcaatctctacctgatctcgatcgccatttccctcaattttagtcatatccttaccctcctctccggattcattctcctttctaccattctcatcatctttggggtgttttttttttgccaatacccaccaacactgtgccatagtgctcccatttctgggcatttaccatattttatctaccattatctacttaggtacgattttacgattcgactgcgaagaactagaggctcgacatttcttgtttattacaatatccatctcacgaaacttgtttattggatgtcgattgagtagaaatatataaattctgctcttaatttttccactgcttcttttcccttccccgcattggctacgtcacagagccgtcgtaagctccaagtctttgccacgatcccaagtccctctgttgagttctgattcgttcattcgcatccaaccgattacctcccccacttatagataggcgtatctccactatagcttcctcatacacattatattacaacctatcacacagatcagccataaccgaagcgcacatcaaacacctaatccgtactacgtattcgcaatcgacccgaccaattgatcaaccatgccttggcaaccaaggataacccaaaatcccgaaaggaccccggggaccctgatcgggtcgatcgattcgatcgacagtagagcaatcaccacaccaaaacggaacaagccctaggtgaaaaacaccccgaggcattagtcgagaaggtacaaagaccttcaagttagtatctatgtgctgaatctcatattatacggagtccaatggaattctgcgctcagggtcgggtcagggtcgggagtgccgtcacccgcatccccgataataccatattgatgctgctattcctggagaactgcatatctgcgcattgtctgttatcagcactagattcatacaacagaatctgttcgctaattgttctatcgttcgaggcgcaaaactagtccagtggagaggcggcacacatccactctatctctggcccgtctgggctattgctgatccttctacatacgtatctcgtaccaatactccgtggacttggcatcgatggtggatttgccacgataggtggtgcgcaatcgaaaaatcgtggctgtaggttccatggtcggatacctggtagttcatcacccaggcaaaaccttccaaggctgcatatatgagaatgggtattcatggatgtaattctctgtctttcaatttcccgaggtcaacacaatctgacgaatacaaaataatacacagtgacgtggatcttgaccacgtagttttcactctgccactgtaaggctcttgtggtgattggtctcgaagacacaactgctgaggagcgggtaaagccttgggggtaagcttgccctgcccgtgaaagacggcaagccctacgtatctagactgggcatgcggggccccttctgattggggtgaacccacaaaaagcgccacgatgagaagtggagactccactcagtatgcaacgtccaacatgcatcctgatatgcctaactcattcaatcgctttgctggttattagttgagagcagggaatatatcacgctgcagaagctggcttctcgatgaatttcgccgcaaggctgtgcccggcgctgtactgtgaggccgcaggggcagaagacgcaggaacttgggggactagctggacgagtctggccgctgtggtcgaacttgaggttgccatgataatatggttctcggcataagcgagctgaacgttcaagaccgttgtatggttcaaatggatctactatatagttactttctatccttatatcccaaccacatccggatcccggcaaggtcgcccgtctcgggagccgggtccagacctaacttagaggctctgttggaagcgggggccaatctatacgccctagactatctaaagtagctggtatatgtgtcacctttgtgatacaatcgcctagaaaggaataacccccgaatagcctattactacaaaaacagacaccggagtgcagagaagtctagcagcgcgccaaggcctggcgcgccgagctgcaacgtgcgtgacacagacctcgtcaataccgttatcgaggatatcgccacgggcgccgtatacatagatgacctaggtagtcgcggcagccgcaatccaggggtagagagatatactaccgctatggtgtgaggatgcagtcgattgaattggagaattgttctctattatcccttaggcctaactagcgtgatctttctacagcagctactatctatctgcgcatcgaataccatacgctgtgagattacagacatcatagattgattgatagatactcggtatcgggagaaacaggtgggatattagggaagatgcaatcacattgcgcaacaaatgccaaagcacacagacgcagagaatagagggggaaatcaatttcaaaggtcaagtatagattctagacacaaatagataaaaacgacatgcacagaagtgatcaaacccatgctcaccacccgaagatgtggacaataaaatagctccagtcaatgagaaaggaagatcaaggaaataaacagggtatcgatatggaataaaaataaagccaggtgagaccgaaataagcacgcaagccccagagaaaaatcacaaaatcaagatgagaaaagaagagaactactcgtactgacatggatgcatgaagtaatgacaacgcaagaaaaatcgaggaaggaaaaaaaaaaaaatcatgagcccgttctcgttcactcctagtacgccgactgatcggtccccgtattgatacgccgtgtatgcaaaggtcaagctcgaatgacccaataagaaaggcaaaaacgagccatctagcccatctccatgccgtactcgtcctcctccttgaagctcatagcagcatggccagcactgttccagtactgcggctgaccagcgccgttggcactgctagtaccgctgtggaacgaaggactcaggctcggaggtgtcaggccggacatgtcgccgccctgcacggcatcgccggcaatgttagtgtgcttgggtacgcgtaaaccgctacccggtccgcgagtgtagctgaaggaagttgggtcattcctctccagtgcatcgaggatctcgctgcgcatgcgcttctcctcttcggtttgctcgaagggccaagttccacccaggctgccgatcagctcggcgagttccgcttcttgctggtatttgacatgtagggcccacatcagatcgcgagtccagctgacggcaccgttgagtatgtcacccttgttaggacctttctccttttcttcgattgggagacccattgtgatgttacccgccgtcgcacggcgaccgttgcctccagcgaggagagacgtggcggcacttccacctgcaccggccatggaaagagcggtgttgttcacaagttgcttccggaccttgtcgtcttctagtctgtgctgaggaaccaggtgggagagatcctgaatgcgttcgttgatattgtcacgtcggcggcgttctaccaggttatgcgaggcgcggcgacgtcggcgcttggcttcttgtgattcgagatctcccccgccaccagggagatgcgcgtcaaccttggcgggcagtgaggcgtgcttcccagacttgaggatctcggaaatgccggtgtggtgcgattggtggggaggagatgagataggagaggattcgacgtaagactgtgcgctgccgggagttccatcccactggttggatagggttttctggtgacgagcctgcaggccggtccggataggctgggacgggaagctgccagactcaggggtacccaatgtcaaggaacccagtgcgggtgtctttggggtcatggggctgcggccgtcagatgaggtacggtccatgccttgcaagctctggcgcttggtgccgaggtagttctggtcgaaagagctggcatggatgtggggattttgctggttcatgcgatactgctcatagttgaagctgttttggacgaacgggctggccatgggagcattatctggggtgttggagtacatatgcgacatctgactttggtgactcatcgcgataccaccagcagactggtcttgaagataattcacattgtcgcgctgatgaccgttttgaccgctgatctcgagatccaacaactcgtctgtatcgatgccggagtttccgaagttaaagctggatgacatgttctgttgcgagccgtaggagtagggcatgaagccattctgctgctgcatgttcaagtcggacggatcgatcgcatcgttggggaattggttacccatcgagtaaccggagtgtgacatgatgaaaggggtgtagtcgtcggattcgtgtttgatgaagagactcgcttcagccatagcctggtgaaacaatatgggggtttgaaaatggggcggagatcggcgaggggctaagggaggagtcgtggtgccgatcctactgactctccgcgacagttgtcaaaagttaggcgatccgagatgcccgataatgaagaatattggatgaggtggggatgtgagaatgtcacgatctgtgtgcatggaaaagatgttagtcaagactcgaccccgcccgtaggcgacttgaagatgtcgtggcctccgtgcgcaaggcaacaggcaacccaacaaaatgcaaaatagaaagtgaaaaaaggaatgtgaataattacccttgaaacaatgaggattggaagaatgaagtccggggagactgtgagacgtgccaataagccgggggaatttcctcggtcttaaacccgggatgggtgcagatctcgaccacaaaggtgtcttgaagaaatcgcaaggcacaaggtgtaaggtgtaaagtgatagtatcttggagaagttctatagaactttgtaagtgatgaaagagaaagaaataaagctgagtagtgcgcaaatgcgaggaatgaaagagaaccggggaccaggaagaagaaaagagatcaaaagaccagagacgagcagggaatgaaccaagctcaaatcaggtactcccagctgaactcggttgatcccagttgatcccagttggagtatttgatcccagttatcctttgcagatgtaaaaagtctggagaagaaacaagcggtgggaaggcggtgagatggcgatctggggaatttttttgtcgagaacgttggcctcggtatcatatagttcgtagttcatacttcacccgaagttgtatattggccacattggatttgagtatctcttgcgccttgaccccccgggtttgctcaggatttgatgcccacgctcggattgcaatcggaatacgagttgatgcaagcgcttacttcttaataacaaaagaaaaggacatgcttgggcttgggtttgaggctgatgaaatgtaggacctaccaagtgaagaagcgtatgcgaagtcggtgtatgtaagtatacttaggtagactgaggtataaacctgtgttgaggttagtgaaagatcaagagtatacatcccaagacatctcaataagcatgcaggtccagacatgtaagacatatcagcagagccccgttcacacgtgggcacctggcgacaagacatatatcacagatgcaggaacgaaggggatatgtgatatatgagaaggaacttgacacgtaccttgatctgtatgctaaactaggagttcacggggcataaagtcttcacaaatcagaagttcgagagcagaagtgcagtgacaactcagaggaaagctcttgctggtttcgcagacggacaccgaggggatggagactttatgaactcaagcggcgctctcctgcatctctcatttgatatattacagcatcggtcatgcagcccgtcgatcggtgggaatcgatgagattcacctacgccatcggacatggatttttatttttattttagaattaagttgactactaccatctggatcagaagggaaaaagggcgtgtgtgagtgtaaatggatgtgagtggatattgggtgaaggaggggtggcaacggtaaacccccgagcctcttttgtgtttttcttcttcgtactatacatagataataataataataataaagggaaatactaaaggaaaaaaacattatcatattcacaacccaaaataaaaaacatacttgggcaaaggggggaagggtgatacggccggatcaagtaaaacggctatcccatgatacacattggtatatttgtcacctgttactgcaatcatgactcacggatgtcttgaatagagcaagcaggaatgtatcagatgagattttggggttacaagcataccgaaacctatcttctcagaaacccttatctatcattcagagtgggagttttgcagcgtatattcaagattcccgaacgaggccatgtggatatggttgagctacattaacaatgcagagtactagcactcaagatgccggagatggtatagatcggctagcaaccgtaaatgactacgagtcgcaaatatcatccggagaacctaacatgcataatcccattaccttggcaataccagagatagacaagattggacaagatcctagtgtatatgcgaaagaaaagcataaaagaggaaagaggaaagagaaaaagaacaaagaataacacagaccacatccataagcactagtatcaactctgcaagagcatctgtgcggtctactcttcatgtgggatgtcgtgcagaggagtctggagtgacgatcatatccgcactgtgatcgtcaagggagcttggaccttcatcttcctccgctctgactacgcacttagccttgagtctcttctttggtttatttttgttctacgtaggaggcggacttgtggttgttgatctaggatacagcggcaaagggaataatgttatagttcaatatttggaactctacagaatgttcaaggcagtcagtaacttcggacttcggacttaactgtccggcctttatcggaagcaaaaagtagaatggtagaatacgcagaaagacaattggaggggttggaatgtgtctaagaccctccaccaatagtgaatcaaagcaatacacctcgctttggtatgactgtgctaagccacatcgccaaactttcccctctttgagagccactctagtttaggggatcatagtatgctgagatcgacggatggggactgatctccgagatttgagtggaaatggatctgacgtcccgtcccgtcaaggttcagctatacactagtaatccacggtcgacgcaagggagaggagttgtatccaacgatctactttggtggtattcaatacacgatgttgagactatctatctcttactcaaagtacccgtgcacaggaccctgacatgacgacatcgtacgtggttaaggtcgcactccattccggggtcacggataaactgcctcgtgtgcgtcgaggacatcctacagagtatgtctgaaaaagcaagagaaaacagggaaactgaaaaagccaaagcagaacccaaatttggagaaacaatgaggctagtgataatgttacccacggtgcagtccggatgcatattagtgcccttatggttatcggataattcccctacgtggtacacgggtagctacataaatacagtcaacagggaaaggttatataatgggtatgcaacatcatctgtctggagttcttccgatacgactagcggcaactatagccgttataccgttattgatagatgcttctgcagggctgtccaatacaacaactttgccgccactctactgttacagttacggccgatcgctacagggtgcgcaccagccatgaaggatcgacagtgggacggcaactaatgattagaagttgcagaaagagcgggggcactatcaataatggtcatgagtctagatcgggtatagtaaagaatagactattattatagtgcaaattaatattatagtaagtcagtcatatggcaatcacattcaaagcatgtcgatttgtttatgcaacaaaaacctctaggggagtacagactatagttctacatgtctttaggggatttaaccctacagtaggtatagcgcaaaggaaagaaatatggataattatacaatgttataataacctaaaaacgactaagaatagatagtaatctatattcaataatacacaaagtcgctgtagctgggttatatacttgctacatattggatcacgctataccccattgggaactagcctcctttccccgacttcattgcagaactgggaactgccactatacaactatacctctacacgccacataggcaacatttcaccctcttggtaagtgacatgtatttctttcattcccctggttataatcctatggggggataatcctggtcaataaccccacagggctcggtccgagagctttgtacccaaacactggaaaccatcatcatctgacagtttcagcacttaacgccgatcgggttggtcacatcggtagcttcacgccatctcgtcattttgcttggttcccctcgtctttataccctcctttctcgatagcgctgcgcttccttgtccaatcagcactccctacgctgtgttcgcttcccatcccttctcggattgtgcccgcaaggttcaagctttccacctatcttccgtttggttggcttatctcgccacatttttgaacggcgtaccctcgattgcgatacacttgcgccgcgccagaggaatcccaagctaccccggtagccatcgccagctccgcagagatagctgcagatcccgttgggctgacgccttatcactgtgcaatagacagacttttcttggtcgcggagattgtccataaagtttatctgccagcgtgctattcaaagcctttgatctttcgatcttgaccggcatatctccgagtcggagaactttcctggaaagtaggcccgttcgaacccagtcacggcgtgtcccagctcatcagaagccggatccacattcgacacagtcgtcatctgcttctctgttggcttgagcaagtccccacctctagccaatccttacggatcatccaccacccgcgcagatcatctgcactccatctcgcatagtccctgcagagtgttctcttgtcttgacttcctagactacgggccttttctgcagacgcagtagtgcacgtacctctactcgttttatttgggatctaaaactcgactaaaatctgacttaaattagtctcaaacatggcgaataactcgttccgagactctgtcaactcactgggatggtcgcgtagagacccggatctccccgtgcaaactggcgcgtcatcgaacaccccattcttatctcgtctacagtcttacaaccccttcggcgaagggggttatgttcaactgcccactcacaatgaaggtcctggggccccgttgccggcaccaactcgacgggaagaagaagagggattctttgcttgtaagtattttattgtctgtcttgtgatcccccgcttcccagatcttcccgtaccccgttgcataaggtccaggtgatgagactgcagttcctgcgccggcaggattcattaccaccatttgcaagtcgataaatgaagagagaaaatcactaacatggactgtgtatagtgagtcggtgggatcgcatgctcatctttggtgcatgtaatttgggcgcagccatctgtttcatgatctgcttcttcttgttccctgtcttgtcactcaagccccgcaaattcgcggtcttgtaagttgcctccgcgatggtccgcattaatgtgggctatgttttccggctttctatggcccttccagctttatttccttttttccccggctatctcatgctctcggacgaccgagcaaatcccgagctaggatagaccaggtcatcggtcaattttggttagggccatgtgcgcctttgtacttcacactggaagctgattggccttgattgacctatatctgcgcctcatgccaagaacattcgtctctggtcttggatatctcttgctaacaggtttctttattagatggtccgtcggctcagtcttgtttttgctatcatgggcggttctcatgggaccgtggacttacgctaagcatttggtctcggggacacggttgccattcacagcggcctattttggatcgatcgccctcacgctctacttcgctatcggggtaagtaaaatcgatttctttatctttcttttttcgttttcgttttcggatttggattttgtgtttgatctttacgctttacctcgttgtgcgccgacgatccttcctctcctcatgatactcccctctgcatttgcttgtttgtcgcacactcgctctccctctctctatcctagtccgtcttgtcgcactgcacaaccgggaaaaggggaattttgcaaccttcacacccatcgcgcagtacaacctgaatccacggcttgtcatgtctgttgttggccgcagctactttggatccttcgaatttatcacactctgcgctcggccgtcctctctactctaactcttgcgtctgtgccacgtcccaccacggtgcgggacttggatgtcctttcccttacttcaccttgtccaacacctaccggtgtcacagagcgcggagtccagagcatcgagatcaacctgtgtctcaccgtccctggctatcaagtcatcttgttctatccgcatatcacaactacacaccatccacttgccgcattcggcaaaacatcctcttctggaaactcatgctgacttcttcttttcggtgcattctagcgtcagaacctcttcctcactctgatcttctcgatctttcagctcgcggccctcgtctggtacctcgtcagctatttccccatgggcagtaccggcctgcagtacgtgggtcgtttcggagcatcgcgtgtcaccgcttgggtcagtggttaatttgttcacttgctcgtatctgatatcctgctctttgtcggctctcacatatatcgaacggtatactcgttgttgcttcgataacgggcgtggtttgggctatttgttgtgtatatgtagctagccagaactacagtgtttggcactttgatttcattttttccctccaaatacttacctttgcgtgtggacttcgtctcttggtagcacagcactgaatattaatatcagaaaatgggaccttgtaggttactagtgcatatatcggacttcaggctacgcttgatgggtttccctttccgctttagtgttcagctcttgccgctttttgacctctcaagtgaactgggggacgttcctaatcacactcaggcattacctagtatcagagataaactacctgagacctaatcttagaagcgaagtaaatatgaatagtaaaaatccatttgatatcaaagctagcttaacgaataagaatgaggacacgcaggcataagatctacaggtaatgcaagcagcaccgtaaaatgcaatccagcaaagtcatagtaatagtcatagtcagcacgaaagaaatcaagccccaggttcaacgaccactctgtttcatcttctcagtcattcacattgaaaagtccccttcaatacttcccccgactcatgaccaacccaacaacaccatcaacaaccttaacaccctcgacctccgcctcaaaaatccccgtctcaccaccagacccgacctcaacccaccgccgcagtaaatcattactctccttcggcttaacatctggcgccaccgtgccgaccgtgatatgcggaatagaattcgcacacggccattcagccgcaccggtctctgtctcaacgccctcggcaggcaggatgcgcgcgacaaaggccatgatgcggttgtcccagacgagacgctcgatgcgcacacgcgcggagcccagggctggcgggtactgggctggattttggacggggtttttggtctgggtgtcgatgtagcagtttgctagctggtcccagatctctgggttgtctttcttcgaggcgcggtggatgagggttacgtggaaggttggttggagacggcgggagtttacgagttgattgtagagacgggctgtttcgggggctgttgttggccggaagagggagtgcaggattgaggttatttcggtggttgggagggagatgttgaagtattcgatctttttggagagggcttctggtgagaagggggagtctgttggttcgggaaggagggggccgggttcttgactcttggtctttttctttggcttctgtggagcgccgtagctgtagctgagatcctttgtcacggtatagtcgtttagggaggcgtcgatggcttcgtccagctctgctgccgttggcatggttggaactaggcgggggtaggcggcgtgtagggctctgacgactgtttcgaggttctcgcgagaggaggcgcacacgtcgaggtcaatgacgtgatcgaagacctggtctggcaagcgggtggtgtcgacgccttcgaagcggccgaggaatccctccatgattccgacggtctcttctcgggcgttggtgccagcccggatggattggtgattgtcgccacgctctagcacacgctttcgagtgacttctcgaatggcgggaagcatgtctgccttgggctcgtgaacccaatgcagagcgacgaactgcgcatccggaagcacggggtagatatcgtccatgagctgcttccgctcgcgccgttgatggttgttgcgatcggcgattacaacactatgctctcctagagcatggctaatctcgaaagcgaacttctgtgccttgttcctctgtttgggaatgttgtcgttctgaacatgtccccatccgaagagcttaaccagagccaaggcgactgtcgtctttccacatcccagcgaggcaaccggtgcgaggatgacatgtttgttgacatccagagattcgttcagccttttagcctctagagcgataagctcggatccattcattcctcgttctttgaggaactcatcccgcaaagcgatgataccgtggttattcaggtaatcatttgccatgtcagggttcctcagcagagtccgtcgagcgaactgcaagtactcttcagtgaccttctcatgcttcttgatcttggggtgtttccccctgataacggatttggtgcattcacgccactggcggtacatcaagtacggctcttcgaacttatacttgaagaaccaattccggtagggttcagttccgttatcgctcagctggcatcggatgacgaagccctcagtctcacgtccatcccatgttcctgtctccgcgcatccttctaggaagttctgcaccctgaagatgtcatcaaatacctcgaacttggccttcttgaatccccagtcgtcagcaaacttatgcaccttgtcacaagacattgtctgaaaatcaggctggttgtagttgagaccgtggaggtaaatgcccgaagaagcctcatcgtaggccagcacatgctcctcaaaagtgtcgtcgcagagttctccaacggctgtgatattcatctcgcgcagagtccgggcaagctccttgacagatcgattcacggacgagacatggcgttccacccaacgttctcctgcctgcgcgtgggagactttcgtatcgtcgcgggctccagtcgagtgtttactgcagactagcaatgtgtcgtcttccaaagcagaaatgaaaataatgcatccattctcctttacactcagctcgtagggaccccttgtgtttttctcaatgttgcgccattctgtgttctttgtctcgcctacgttgaagaacttgtcgtatccgcgcgttgcgatttcgggggtgttgtccttccgtttggtggtgaaaagacctcgcgcatatgtcggcaggccggcctgcttgtagtcccagtcctggaacttccacgagtccacaataacattattggctagcacaaaggtgtgctttttgcaggtgaaccttagctggccctttctagctttgcgagcagtctccaggcttttcaccagctgtgagatgacgtgcggatcttgagtcgccatttcttgtgagttgggtatatcaaagtgtgagatctgcacggagaggaggggcagccaagagtgggggaagagaaaaggtgggatatttttaccgacctcccacccaagaattcaggagtatttagagaaaaacgcagaataaagcataaaagaaaggagtacagaaaagatcagacgaagagtcagaccgaatgtgtcagatcaggtgcggggagccgaaagggaaaggcgggatattttctttttcagctttgacttgcctgaacatcaccaactacttctgactcacctaatttacgagttttaatcaatacttctgactcatggctcaaaatccttacctattggcctgcgacaacccaaaggttcttctggacctgctgcggtccaatccttcgatcgcatcgagccaggatgagtccggctactcattgctgcacgccgcagcctcctacggccataccgatctcctacgcgctctagtgaaagaattcaatgtcaacgtcaacctgctcgacgaagatggcgagacatgtctatttgtggtcgagaacagtgacattgcgcgctgcttaatcgaggagctgggtgtggacgccaataagaagaacgccgaggacttgacagccgtggaaaagtttgagacagaaaatgagttcccgcaggtcgctgcctacctccgcgaagtcgtcggtggtgctcccgctccaacacacgcccaggccgcagaagttttgaattcgcccggacccatccctggcagcaatatgaaggtgaacattggtacaatgacggaagaagaggcaaatgctggtggtgagcctgatccagaattcaagaggcgcattgaggagcttgctgctcgtgaggattattacagcgaggaggtgcaaaatgaggtgcgcgagttggtcaaggatgccatggccggctccaatattgaagctatggaacgggaaattcggaggagaaccgagtaagcagaagcattgcgactgttccaacatctacatgaagccaccatcgcttttgaacatgcgaatcactggaagaaatccacccaagcaataccaccccgagtcccaaagtctctgctgattacatcgagcgcggacgggtactctgccgtgtcttcgggatcctttgtgtctcacttgaagttttgggtcgcgctgtgaagggtcgctgttagactcgctgttggcccttggggcttatccaagtggctcggaggccgaagagaagctccgatatgatcttgtaactaggattgaatcacgaaatatcacgatacatccattgaagcaattagcgcaagatacttacttgttaattggagatcatactagttattatgttgatgcaactgcgtagatcaccggtctagtccgccaagctcgagcccatcccgcatctccaacgtaacaactagcttcctacctacaacaacccccaacattatatcatggctcaaccaccgtctcctttccctccacaatcgcagttctactcatcccaaataatgaatcccgagacacctcctctaccacctccaaaacccaacagccacgaagccagtcgaggcggcaccccgcaaaatacctctgcacaagcctggcagccagacaaccagacaggcgcacaccaaggcgcatatcccaataatccccaacaactctatatccccgatcccccaacaatcgaggagggctggctcccagaactgctatcagacaagtcgtgggttccctcaaccttcaaacccctaaaaccaatgacaacacctctaacgcgcacaaacccagaacaaccgacctccagacaattatcaaagacccaagcctgatatccgccctctcaagccaacacgcctcctatacagcccgccaacaacacctcgagagcctaatccagaccaacaaagagctcgcaacccgcgtcttagaaatgcagaatcacctcgccgaagtccgcgcctccaccgagacgatgctgatcacacaccaatcgctagaggtctcctggcgtaagaagcaggccgagatggatgccgccctagccccgtggtcgccgaaggcgctataccagcgcttcagcgcggcgatcacggagcaggaagccgtctgccatgctgttgaagagagtttcctcgacgaagatcatcacggccgagccacagagaaggagattgcagattgggtccggcgcgtacggggcgaggcatccaagttggcggctcgcaaagaggccaaggcacggtgggatgagggtcgagttgggggttggcgatgaggtccaaacgcaacctcaagatacaaatatttactgtctgactgccatttacgatgccatgctgcctccgattcatgatctgtttattatgcactatacaatgcaatctacacggtgcttcaaggtcttgcttcatccgaatcacgcttaaaccaattccaggaatcaatcgtccactcacccctcacccctcatgcctaacagcctcactctcactactctccggcttgatacgtccctgtgcctgccccctaaacaccatatcccgcaccgcagccgcaccctcaacatccacatccaaaccccgctcatcggcccacccatcagtgcccagagaactcggaaagccaaccccccgcacaaaagcgcgtctccgactgcgcgcaccccaagcccagccgccaccgcgccgaatcggaagatggtacatgttaaacgcgatataagcgaagaaaaggccgatcgccgcgccgaagagaatatcaaagccattatgtctgtaattgaaccagcgcgacccagcaataaagcatgccgtggcagtcgggaagaacgcaatcagcattaggtagacgggcggcgcggcgccgcgtttccgcacggataaactatcatcgctgtagctctggtcttcaatcgggtagcgcgggagataaggaaatgcgacggagaatttcgagcagagccagagggttaggtaaattaagccggcgaaggagactggattgtgttagctaggattcgaatttatgtttgcgtactgtatgttgtcactgtaattacgcgtcggagcacaccgaagatgatatgcacgtaaacagttagagtaaatatggactcacaagaagaatgcccactcggaaaactcgcaaagccatcaatgcgcaacgaactactcctgtcgcgacaaatctcccacgaaacaagcgtcgccgcaccccgcaccgactccccaagcccgccaactgtgaactccgcaatgcgcgctacgtctggattgcagcgcgcgagaagatcaggtcgcggctttccgattaaggccttcagaccctgggtagcggtccaggtgcttgcgagggccagcgcgagccccatccagccgacgttccattcccagaatttgcggcggatatattgcgctgcgggggatttagaagagccggggttagaggtggaggtggaggaggtggccttcgctgggacgagtagccatgagaacaggaggattataatagccggggcgaagaggcagactaggagcagggttttggttgttacggtttctttggtgagggggtagctgattgttggatcggttaagctgaaggggtggtggtttggaggttgtttgtagaagccatagccgattagggcgatgccgctggtcgggggtcgttaattgggattttgatgggttcaatgggttggacgcacatgatgaatatccagtcgattatgtaggatagtactagaagcttggaaatagctgcgaggcgtgtcactgtctctttgacggagattggcatggtcgtgtgtgatacgtaattaggaaggaaatgttaaaaaaaataaaatgaagttcaagaaagaacgttggaaaaagtacatagacggggatgacgatgccagggatgattgtggcggagtaagaaggttaatttattttgaatttactcgaacacttcagatatacagtagcaacagttcgaagaggttgaaagaagattagatgactccatactattcatagatagtatccattgactccactttcctattgttcaggaaagtttatcactagatacaggttatagcaggagaatgtcgagaattgcagttttcatcaatttccaccaagcgaggtggttaacgcagtttgcttatatacaaactgcctaggaagtgccaagctcgcatgctacggatagcctcagtcggccatgaggacttacgatctgaccgaatagtagtttcttggtagtgattcatagagatagaaagacttctaaactacccatatgcatgtaagtagagcccccgagattaacaatttcaataatatcgagccaacgcctgcaattccaaagaaatagccaaagaaagatctagaatccagtaatcgtccggcggcccatgatggcatcgttcagctgtctgtgaacctgttgaaccccctcgaaccgaatgaatccacacgattcactttccaagtggttgaacagactagccagggagtggaactccttcggacagcctcgcttgaggcagtggtagaccttctcattgtggacgggtgagttgacatgcgaccccagcgcttttggcgagttgaacccctttttgcataggtaacacacccagcagctaccattccaggcattgtcggtgaccaggtatgtcatgtcctgttcatgttcaccgtgccacgcgatctgcttcttgcagacaataccattcggatcaagctgttgaataatgcggtggatgcggtcgcggttcaagccttgagcttgagggcaggcaccagactcaagatgatgggagacaccgctggcagtgacgaagccaacccgacagaatggacacgcaatgttggtgccgcgatggatcttggaattcaggtgctatgagataaagacgtgagtggaacgggttcaaagtttctctcggatcatatcagctcgcctacctggcgcaaacagttcgcgttcataaattgacggctgcattcttggcagtagttcttgtaatgtcctttggcgctcatatgattctccacggcctgctgcgtgtagaatttcatcgggcatgcctcacatggaactttcgggagccaatgactcttcgcgttcatatggttgttagcggcgtgttgagtgcggaaggtgctgttgcaagtttcacagtcgaaagtcggcgcccagtggtctacagcattcatatgctgattgcaagcgttctgggtgcggaacgatcgattgcatgtttcacattcgatccagtgacgttcgtcatccatatgctcatcacagtcatcctgatcccagaatactgcatcgcaggtgatgcattcgaacatgatggactgatgtaaaggtaaagaatgatattagaagaagaaggggagagagagaaggatatatagacacatccaagaccttatctcttatctgctgagcaaacgcggcctgtacaacacactccgtttgatcgccatctaaaagtacacaaagacaacttagaaattattagaaagatagttgcgatgcatattttaggtaagtgtatagatatgaagcagtataaaggttgcttagaagatgcggtatcaactacataatgttatgaaagccgtgagagctagaaactacccctcaacctcacacttccgggctttctgactcctccccaggatgactgtacttaggtcgcccactggcagtgcgatggggaaatcgaccgcttcgaggatctgcgcaatgaaaatatgccaaatcggaagacagagggcaaaggtgaacgcaccagccgcctattgataaatcagtacacatttaatatcgaagagaacaataccatatttgcaatataccttttgtaatttggccgccagcactaggttccccagcgccatctggaaatatattcctgaaaataatccaaatgtgatcacaagcagaaagagcgcgaggaagaggcagacgttcgtgcggagggcgcaaattgtgtatacgaaggtgatgagtgcgagagtgacgtagtagaaacctgtaatatattcggtcaggacgtgcacatgtacatgatggggtgtgaaaggtaagactcaccgacagttgcgctgtattcagcggtctccatgcctttcagtgtgttgccatcagacgagtacattgtgccaacggcaaagaatggcatgagcgatgttccctgaaccagccagaatgtacctatgagctccagttagcaaatgcatggatgcgtccctaatccatgacgaactacacataccatatgtgaagaataatgcgcaagaaaatgtattccctagaatccattcgccaattgctccgaatatttgtaccattgcaccgaagaagatatagactggtctgtgggagggagttgttagtactgttttccttgcagcatcagtatggcctctcttacaaaatggcaccaccgtttccacctgctcctctccatcccatggtaagcattgcggtcggcgtcgcagacagcaagaaacccatcaatgaaatcggcgtgggatttccaaatgtggaacgcagctttcctgcatttggcgtcttggggctaaggtatagcttttcaaaaacatcccgtggtataggaagcataacactgtcggtggtctgataccgacgaagcatttctgccgtagaggtctctggcttgtcgccgatagtatcgtcggacattttggattcaagggaaggatttttctttcttgaaaaccctagcaacggcggctcgatggtaatggtgctgatctaacaccggaagacagcgtggaaaagaaaatatatgaaccagaccacgactcgcagccccttttatgctctttcggctattcaattattcggctgtatatctaggaaccgagcctcgcagggtcttaccaatctgttaccatataattctatttttgcaacaattacattctgtatatcttacacaccttcttgtttggaacaaagtgcggtggtattccccacaatcctcaaccaaaccccggatttgctccgtcgactggtaaccagcaacttggtctcggcctatagcgcgcaattaaacatgcgcgatccaccttgcaggtgaagcaattgggtagtatgattcgttggctgaatcacactagatgcagaacgggttagagcaatctcgtatcctccctagttttcgaattggcgtggggcagacagtggggggtgtgcatgttgcgcggtagtcatgtccgctccagttccgcttccccttttcgtgttcccccgcaatggagttgaaagccgaggtattggatctgcgggtcggcttcctagtatctagttttgatctatcaataatggctgaggtataaaggcgcacgcgtttattatagactcgcccagacctgggccatacttctttagctggctagtggcgccaataaaaagtgtaatcagtaaagcttgcttcggtcaagtcatattggccgcctcggcagttgggctggcaaatacagccgcgctttggcgagatgatattccgaccttgtggatgtgtggagtttggggaaaacctggggccccaggccccagtggagcttcaggaggataatgcatgacgtcatcaacgagtgattatcatagtcgatccaaaaaccaaccttgcaagcttgggttcacagagatctgacaatctcttacgccgcgttaccaccgcgattgctatcatagcccggcccataaagtcaatataatgttttattccggacgtgcaataaggggatctcgacaggctaggctacaagcctcgatcgttatccacgaaagagaaattgttcaaaatgtaatcaataaacagagacaatccggacagctctactcactttcatatatacaatatcagtcacactatgcacgagttattatggcacaaaccgatttacaacgagtggcctagacacgtcaagcgatacagtgataacatacatagattatacatatcttctccaagtgtctgaacaggcagaatgattgaggaaaaattgtgcagaaaactaccaaatattggctggaggatgaagaaaaagagaggctctgcgggaagtggggccgcttcagaccgaggatcggatctcggaataatgctgttcctggtagggtggtgcatcgtcacctttgaccagagacaaaatttcccagccctagacatcattttagctaataagacaactgcagggcaggcacttgagaaccactgttttaagtaagctacttgggatgtagaacgaaatgcttcagccctagctcgggaatcctacttaattctcctgttttataactatccttttactcgaaagctactagaaatatagaagatatagggactttcgagtactccatgttgaatatctgctctaaaatatattagcgacaagctcgcccgtaaatgcacgaggtattaaaatttaccaacgacgcaaaaatcacttaatacgttgaagacccgagacttagcagatctcgcgatcttctacgaaaaatatacgcccggttaacgacaaactcccccgatttgaccttcccatgaaagatatccaacatggcttcagccacttcataaactgcatcctcgtcgggaagttctccaccaacacgaatcgatacacagtgagagtacctatgatgcatgggtaattcgtcgactgtaacttgcctgttcacgacgcgatacatcatacggcggaccaactctagatcgttaagccaggcctcttctgggtcaaagtacaccgtggcccacacaacatgttgtccagatggtccgtcggctacaggaacatcgtctatacgagtcctgaacgcggttcgtgttgacatattgggtatgaattatgggaatgagcttggggattggctgtagtgggagtttttcttcttcggtggaacagggagtgagatagatggggctgggtgagtattccctcttcgagtggtggtaatgcctgggcataggagatcaaggtgttcatatactcccaactgagacatgatgatatgcctgactatatagtgggttgcttgggctcttggtagaaacaaagaatcttttaacaaaacaaccgctttgtccagtcttcttattctgattgtcttattgtctactaattataagactcgaagtcattctttgtctaaactcatacccactatatcaacaaaagaactcaatccagatcaatgcaaccctctcctccaacctttagaaagcatccgaccttaaatgaaagaaccgaaaaagtctctcccgatcaatctgaacattcccctccgcacattccgcctgataaaaaagcgccaaatccaacgcatccctaagaaaggcatcaaaaaacaaatggcgaaactgtggaaatgcccaataattcccacgggtcggtaacgagagacaccccatgactctgtggtgcatgggctcgggggtaatcgagatactgacacggtgtgttttcttagcgattctcgcgtggatggcctcggcgacgagatccatgaactccgcgtctgttttgtcgcgattttctggggtcgcgacgaatacgtttacccatactatgggtccctcgatgtcgcatctctcgtcaatgtaagcgccgtcgcgggtgaacataccttgcataccttcttgtgccatattgaattctttgatatgagggccactccaaactatttggtatcggctttaaaacagacaaagccttcctggtgtactggtggttgaaataggaattttatgagatatgctcgtataattatattacttgggatattgtcagggctttgttggcattgaaagtctatgtttctttgatacaatgacttttttgacatcaattgaagataagctagaaatgatccccattgtgggttgttaagacaaagactttgaaattgctatttctgtttctacatagttctgtaatgtatgtcggtcaatatcatagcttcattctcatatactagcttctcatctaacgttatgtactccgaattctactatcatctatatacagtttcacaaaatcatagcctcacagcttaatccacctccccatccaagtttcaacaacctctttagcctcgtcaaccagaccaagatcaagcaacaactgggttgtgccacgcacagccgaatccaacgccgaaaagatccaagcatgtgtataactagtatgctccccaatgaaaatagtcttaaactccgtctggtagtaagcaggcaaataaagctcctgctgcccaacaagcggactagcccaagcgcccgcctgatgctgatcgacctcccagcactggcgattgtatacacccgtaaactgctcagcagcaatctcaccatggacctcaaccatcgtgcgctggaccagcgcaacgtgttcttcctcgctcagtgccgctgtcgaccgagcgggcgtgtccgagatatatgacgctaggatcacacccggtccggtcgcattcatgttataggagggatagcacacattcccgaccccggggatatcaactgacccacatccgccgaagatgggcttttccatgtgctcccagaaccgcgtcttgtagagcagtgacatcttgcatgcggggctgtagttcatagtcgagattgcccggctcaggagtgatgagtaccggggtagatcccacagtctgaccttgctgaatggtgcagtgaccacggcatagtcgtattcttttgtttccggtaccatctggaagggatcgtcgcgccatgcgactgcgactttaccggctgtctcgttatatatcagtccggcgactgtgcggttgagagtcgttttctctgcgacgtgtgggtagaatgcgcgagggagggactccagacccttgtcgatggtgcgccatttggtggctgcgaagtagacgtcgtcatacatatcgctccagattggagaggtgtctgagccatcgacatagtcggttatgttggtattgtagcccatcgcgtatttcaagtatccggcctcggaccagtggaacatgccgtcttcgacggcttgcttgtgggcttgatacatgttggttgcgatcttgcggattgtctcccggttgttcattgtggtatagttatcgtatgcggattctgcttctgcgacagctgttgcattggacgaggctgccttgtagactagcgatgagttggcagcgacttgggcggcactaggaattaagccgttggggagacggttgccgccagaggctgcgggcacattggggctattctgtatccaggggatgaagttgacctggagatctcgtttatgtttgttcatcttgttgagaacgccggcgagttggaagaccatgcggtgatcttggatttcgagtgtctcgttcgtatcagcataggtaatgctaactgggaaccgcatcggtcccatctcctgatattgatactggtctggagtcgtgttgttgaggtatttcgtacggatgcgaccaccgactcgcccagatgattcatagatgtgccagtcgtggataccaacagaatcgagcagcagactcgtcatcaagccggacattccaccacccagaatggcaacagaggtactcttcgctttggaaacaaatgcttcgccgtgcttctttgatttcatgtaggccaccccgtcaaaccacgggcccatggcatctgccacatcggcgatactctcgcgcttcttgacaggtgatgagaccatgatgggagaggagcggcccacaagcgtcgatccggagaaagcatgcagacaatgtgaatggggtgcgtcggatggtgtagtccagacgaatcgctccggctgcgcctcgcgtttcacaaacgtgcttccgatctcatggtgactctgcgtcgggtcttggatcccgcattccccgtagacaagctgcagatgaccttcgaagtctctgtccaggaactcgacgtggacgttatgcaaagagtcggaagttacacccccagggctgtggaaccgtattacctcgatgtctctccccgcgaccccggctaggcttaaacctgatagacctaaccccaagagggtatgttgtagacaaactttcatccttgatctgagcagtagaaacgtggaaacaaaatatgagcgcttggcaatagtctaattgcctccatgcttgccgtacacgttttatatatctttttttttgttcgactcaagtatcttcggaagattgatcccgtatgtcaagctatcattatctttgagggggtatttcactgcaaccttcttatctagcggtgatattgtagctggcgaaggtatgtagatacgatttctgcatccgcaatatattactatagcctctgcagcttgactagcgtccatatcatccatcgcaaactgttacgtaaaatgacagcattctaagggccagtatgaatttagttagcatctcagatctagccagctagagacccggaatttttcgagagcacaggtcccactttgtcgagtgcagctgtcagtggctgtcagtttctcttatcaagacggttgtttccgactgctatgttatcttagagcggggtgttggagctgtctggggatcgatatgttgtattctatgttaagcgcggggaaggatatttcttgtagtcaagatatgggtttgatttggatcgacaatctcgatattcttatcagttggattcgtaacagtccaggaaggtacaaccgtgggtacataagtacgtaggataagaagtcagagccaatacgcttgagtctgtgaagcggctcggcaagagggctactctccaattggtccattcatcagacgatccgggaattttgatatgttcccagtgttccagttgatccaccacacgtgatgatctgcgggggcatttggctacataggtttatattaaattcctcacaggggaggttatagcgaagagtagagataagtaaataaagaagtatattaagccaagcggaatacttccatgttcggtacttccaaggctaccggtatgtagccggaaggcgccggacccactcggccattgcgggggaggatgatgtcatgctgatgcctgaatatgcctgactatgtacattgacccttgacacacaaagaatttccattgaaataccctgataaacgcatctaaatcatctaaaatgaaattctagataggagactttctagcccaatacagacaacctcggcacagtcatcgcaaaagcactcgaccagaagacctcgaatctcatccaagccagccttaacaccaaagcatcaaactggaatctgaagtccaggaagtaagatcggggtaatccgcgcaagagggcacgatgtggagcctccggtgccatctccgggccaagttcctctatatcacctagtaaggaaccaagaagatcgagttggtcgcagacttcaaaacatttgtcctaattctccgggctgaagccaacatgttgtagagtgtgtatgatgctctttaaaatggttgtgaaggtttcatgtgcctagttgaagcgctgttcaaggtcttggggatcttcggatgaattgatctttgggaggagaagagaggtgttacccccaaggtccttgctatgtggtatgggtaaattttgtagcgacaagtcaagaatgtagatatcaatggatcagtagggaattgttccaataacgacagctcttaattgtaggtggtactgagactatttaagcccatccagccagctttctcacattaagaaagacaatgattgaaaacatggaaatcaacagaactcagatgataggatctctctttcctgcctctatcctttggtcaaagccttgggtagaggtgtaaaggaagaaatacattgtttttgctagtaatttttaaataccacagacaaagggagaaaattgaaagagattttacatggaaacgattgaggtatcatgcatccatggatgcatggatggtatattgggttatgagcaaatcaacgctaaaagagcacaaattggatatcaaaagttcatcaatcatcaatcacaacatatcgttgtctcctccaatttccgtatctcttcctgcacgtcatctattcccactgtgacaaccatccaatcacataagaacttgcccagtcccgcaccaatgaagatgcaaataatcacatagacattgaagtacatggccaacaacatggtgatataagcccccgcaaacgtgactgcatgaatcacagccctcgtcaattgttgtaacggcgtcgcgcgaaatgtcacggcggttctggcagattcaaatctcctgacaaacgtgccgtgtagggcttggcgctcaaattggcgggtcaggaagttgtcatattcccgaccaatgcgccgacagaactcgactaacacgaccagcagaattgtgccaatacaggttgcggcaaacatgccattgttcttgatctgccatcctgcggacaggaaacaggcatcgatggtgtcgaaattgaacatcatctggctttggtcagcgaatccacttgaaaggtgccaaggtccaaatatcttggcactcaccgaaaccttgcagctgctcgagctggtgctggaatccatgccctccatcttggccggtcttctgggtatgcgaggatgagaagttgaaaatatggcgcgtccgatatcagctcgatgccgctgttcttataacctggtggcttctccccacctacgctgaggcaaagtggagaaacccagcgatggcgtgggagaaatgtgctcaaatcgccgcaaatgcgaaaatggccgcgttgaacttggaagttgggattcgcgtaatggcaatgaataaaacctcgtgggtttctcgcacagaatctcataatctctttcgcgcttcgccatgaccagataatcccgaccggacgcagaattaggtgttcttttatcaactcgaactcgagctgaattgtcgctctacactcattggaactgggctgaggctcataatcggtcttcaacatcggcctactgcatagggcagctcaagacataatgtcgtttccaaaattggatgctcgccacatccagaacatgagcgcggcgacatcattagagcctcattggggatactacgatcgcgcccttccctgcaccaacgatgcgggatcgtgcgcgtacctcgacgatgtatacgcatcacatgaccggggaatgctatattcaggcattatgtggtgtgtcattggcacaattttgctcctctgggtcgtcctgaaccagttcaatacgccaacgatatcaccagcactagcagcaccagaactagccggactatacaaggtccgccgctctgttgcctcattagccaggaaatatctcctgcctgatgcggctcggctcatcttcggccgcacaacacgcctccaagtgctcaccctcgctctgttagctggctacctcctcatattcagctttgtcggtattctctacaacacatgggtcacgcccgtctcgaagatgcccggtgtatataatacccgcaacagcatcggcccgtggtcagaccgcgtcggcacactggcctacgccctcaccccgctctccgtgctgctaagcagccgagagtctttcctctccctcatcaccggcctgccataccagagcttcaactttctccatcgctggctgggctatattatcttcctgcaaagctccctgcacacaatcggctggtgcgtcgtcgagctgagattgtaccagccgcaacccaccgtcggaattgaatggatcacccaaacatacatgatctggggtgtcgtcgccatgatcttgatgttcttactcgtcgtgctgagcacaccgtggggaatcagactcaccggctacgagaccttccgcaaactgcactacatcctcgctatggtctacattggcgcctgctgggcccactggaagcagctcaagtgcttcatgtggccctcgctgatcttctggttcctcgatcgcggtgctcgactcgttcgcacaggcctgctacactaccaccccaaccactcgggtagtctcgggctcggcttcaagcccgccgatgcgaccatcacccgcttcccggacaccgaacacggagatgtcatccgcctcgacctgcacaataaccaggacccctggtccatcggcgaacactactacctaacctttgcgaagtgtagtatctggcaatcccaccccttcacaccactcaacctccccgtcgtgtcgaagggtacagtccaacactcatacatactccgagcgaaaagcggagaaacgaaaaaggttgccgacctcgcggccaccggcacacctacaacacctgtcatcttgaccggcgcatacggcgagtctatcaccagtcacttgacaccaagcaccaatataatttgcgtggccggcgggaccggcatcacctatgtcctccccgttctgctagatcttgcccgccaaaaaccctcaccggaccgcaaggtcgagctcatctgggcagtccgccacacggcgaatacagagtggatcgcagcagagctggatctcttgcagaaagcgcggaatatgttgaacctcgagattcgcatttttgctacccgagactcgaggagcaagactccctcgatcgagaactcggattccgaaaactgtaatctctcggtcccgaatattgaggagaaggccgtgcaggtctcgccttccaagtctgtttctgcgtgctgtggatgtgataaacctactgctgtggagcggctcgggggtgcctcggatgatgtcaatagacatccggatcttccacggctggtcgatgatttcttggttgatacggtgcgcggcccgacgagtgtcttcgctagtggacctggtggtatgattagtgacctgcgggatattgttgcgtcctgtaactccggtgagaaggtctggaggggccaggagagatttgatgttagtcttatctgtgatgatcggttggagtggtgaataggatgcgaggagaggggagttgtatatattgcccaggtggctgtattcgccaaatatggaatcatcataagttgtggattcaatgtacatatcatcatgacgaattttatggatcatctatcaacagaaatatgggagtgtagaacaagtacaagggtacaagggtcacaggttttgttaatatctcttcgtggctgtccgagtctacgaggaatatgcgtccactacctagatgtaacgaatatgaggtggagtgagtaagaggatcgaggatcttctcttcctatgcctcgatgatagagtcatatggcttagatgcagagatagaccgcgcaataatagagatatgttaaagtcataaaaaaaggaaagacctatgcctacggttttgatcataaattggaacctaggggacatatccttccaaaaatggaaggtggatccatgtcacgtatggatgcctaaacatgccttgatcctaacaatggtactatggcaactatcaaaaatatctctactttgtctgcccgttgacaatagcatcccgcttaagttcaccaccaggcaaaagcatcccagatcgatcaatgaacgaccgcgcccgaatataagggtccaatttccaatagttcacgcagaactcatcaataacagcattccgtcgcgacttgagctcctccgctttcgacaccttgtccttcccgtcagactgtgagctggcagagacccatgctgctgtcgcagagatcatccggattccaatcatcatacggtcgtacattagtgagtcgcgcgttgcggtgtctttcatgactgcattctcgtctttcacgggctcgtcgtatttataggtccatttttcgtcaccggagaactctttggggatcttgctgcgcggaataaacttgtccaggtcggcaattgaccgcgtgaaatgcacttttgatgcgacgacggggtccatccagccgtgaatcagtttccagatgcctaaggtgatagctattgtgagtattcattgtaatgagaaaggaggatttcttaatggaatcattcgacttaccggagaaaatccagggtgcattatggatgatcagttgccccagagactcggggtagtttgcttcgaagcatctgagaatgaacttgactggtgggtattcctattgcgaatattaacacaaggcagtcatctcatctagcctcagtacggtatcataccatgttagataacccgaatcctgtcaaatcgaagacaattgtctgtgaatgtgtcagctgagtcaatatctcacttttggtcgaacatacgcccgtttcaaccggaggagccaagataagtcgcgtcgcctcaataacatgaacaatatatcgctcaagagcttcctcactctgagcacctggcttgtgaatcttcactctagcatagataacaggtcgaccgtccctgtccaagccatgaaggaagctttttcccatcttgagttggttgataaagtcggcaccttccttcttctcctttgacgtagttttggcactacgggattgctccagagcatattcctctccccggggcagaatttcttcatcaacctccatctcctttctccatagaatgttcgacgccatcatcgaaaatgcctttccgacatcccatttcctggcgcgcaagaaccggagcaacaaactatccgggttttcttgcttgatcattttcaatatcgcgaaacacatttctcgaggcgtcatcttagagaggatatgctccatagacttgatctctgcatcttgcacgcccagctgtcggagttgcgagaaaaggaaagaaaagtgcgccggagtgacctttcggttggccatttccgaaatgatggtgtctttggcattttcattcatgagcgagtccaccttgtccagtgatttctgctctttattgtcggagtaatttccagttgtgagttctccatttgtttcgctattcgatcccgctagtgcgatttcatatgaggtctcttcattggtatcttcgtccttcaatgcgctaataatagcttccaccgttggctcattgatcttatccagagcagcaaacagcttgctggaggagtccttcggaatcggtatgtcatatacagccgacagaacagttgcaatagaggtcagaatgatgatccaaaattcaattacccttgcttcctggtcaggagtgaggtggccgaggtgcccggacataaggtcaggagtaggagacatggcgtgaattgtgggtagagggtgaagtgtaatgccgactgggggaaatcagttcgtattttgctcgcaagcccgccgacggggtcttgttcaatcattcattgttaacggggccacatgaatagcagggatgcctcggcgaccttcggattcacgggcgaattcaaaattgatacctcggtgtttgaacccagtcgatcgtttattgagaaataggtgctaggacctttaccttctcgtgggggatcttgaaacagctccgatggaacggacgccctgtgagggagcctggcgatgacgatcctccatattgggggaagatcgtcgcctctagggagttcgatccctctcgattttgacctcgaatacgtaggtgcgcggatatttggggacgatgattctagtttcaccacatttacatatgaatttaatctaaaccagctacgtattcggtaagtgagctgcgtatgtaagccaagatatatgttcctggagttcagctaaagagaccttggaaagattcgtgttctaggacaagaacatatttaagagataatcatgagcagcgtcgaaaccagccttgtccgaatacttagcggcatgagtacaaaaccttcaatgacgatatcgagatcttcctgcgtcgccgaaggatctccccccccccccccccccccccccccccccgccgccccccccactctcggtcgtatcatcaacgtcactggtgaccccattgacgagcgtggtcccgtcaaggccaccaagttcgctcccatccacgccgatgctcccgcgcctgcgtgtcccgcagtccgttcccgattcctccgtttcaatccagtaatcacgcccggcattaaatcttcgtagtaagcccccacccaatgggcggcctactcaaaatcgctcgcttgggcaccttaccctcttgatagcgaataaccttacccagtaagtgaagtgcccgatctctgtcatctcgctgcgattgatacttaaactgcagagaagtgattgggctaacagcttctctagtgctaactagtgtcctcctcataccggctctaacggtggttcccagctgagtgctcggtatcagtaccctgtgcagtcagccccgatcccttccagcggaggtccgacatcccatagagatggcggatccgtccaaatggtaaaagacgttttattgagtgatgacgatcatcttcttctttgaagcctgatcttcaggtgcgtactcgataatgactaggttgattaccacgtgacctgtcgctccgtaaatgttttgctcctcgatggttttactcccctctacatatccctagggttttgtaaagcctctttttccgatagttctatttgcctttgtaacatatttttgatcatcttgcaaaatgccaaagaaacagccacgtgcaaacatattttgccattctgagttcgatttactttccgttttatcccttgcaaaaagtatacgtgggaaaccttgcttttgcgatgaatctcaacatccgaaaagtggcagtttgaattgggctatatctatatattttgaagatggtattgaatgaatattccgttctcctcgcaaagactattgtatgcttcaggaggagaatacaagcacattccttgcaagcgaggcggcaacgctaagttatttacgcgacaaaagtgatattcccgtcccagaagtgttttcgttctggtaatacctgcctacttgagatttgctgattgaattgtgtattcggcttacaattgaacagtccgacgcatcagaatgatattggcgttccctatatcttgatgagcaaagcacatgcgaaaccgcttgcttcttccggctgggataacaatgttgatttggatgaaggcgcttgaccacgtttgacgctacagcagaagcgaaaggtcataagaaaattgggcaaaatccacgcatccctttcgaacatacgatttgatcgaatcggatcacttttgcgggtagaagacgattatactctaggaaagtgtctttctccagcccttatgtggcatggccgcgatgggtttgatgaagaccatatcccactcaggccgtttgacgacgcagcatcattctacagagcgcagaccttcgctttgcttactcatgtcagagaacttcctatgtagcaccatatgttccatgcaccggtacctacacaacaggaatacgatacgttcagtgaatatcatattgctactgataggtggaatgactacgttaccgtgggggcaaaaatcgagagcgcaaaaaataggctcggctatacctcggctgcgcttgctattttggaacttgttcccttgctagcagaaagagacgatcaaattctgagctctggcttcccattgtttcatcccgacctaagtaccagcaatttgttcgtcgatgacgatatgaatgtgacttgtctaattgattgggcttgcacttcatctgttccaaagtcaatgttactcgtttgtcctggactacctcattcccggaatccaacacccctcgagtttgtagactctttcgcacaaggttttgtttaagggaaaggtttcgatgcccaaacagctcttcttttcgagaaaagcaaggatctttgggaatttgctcgcttagttaatatggattctattcaagattttaatcacctctcggagcttttccaatcccttgcccctggacaggagctttttgcaaagctgaatgacatgaaggaacgggatgagtttatcacctcgttgaaaatgatatcccaatacaccgccacacctgaggaaatgcggaatgagaaacagtattttgaatgtaacggacccgagagattggcgctggcacgccatatctcaacaacggcaagtcttgatcctaagtttgtggcagatcagcgtctctggaagtgggtcgtgatatacttgaagcagcgagacacatatgttccctggccttgagaaagaagttaattgaaaggtgtggaactacgcaaataccgtctcttactaggtgtgacgcttaaaattgtgttgtcgcgagaaggataccatagctcgcgacgtcttgtttgataatgtcttgatttctttctccgcattcctaacttcacgaatataatgtacaatcgaaaaccaagcggccaaggcctatgatatgagaacaccagcaagggctcctaaaagaacaactggcactataaaagagcagcagagtccgaggagaggtgtttcagaactaagttcctcctcgatttccgctcgtgggtatgatatttccttctccgtggtgagcaatctagagtctctggggtgataggccggagagttgaaaagatgagcaatgggtacccaattgtggacaattgtcaagaagcacaagtgcagcaatggtggccatgcaaatgtagtgagcagtttaggaatttctgttccatctccggtcacagccacccagatcgcaaagagcatagctccaacagtcgcaataaaaagacaaatgttcaacaaagcaccgctttgaagagtatctctgtatgccttttggaacgacgaaatggatgtagcattttcgctcgaattggcggtgcttccggtgacaaaagatccctttggcttgcttccgaataggtggaatcgtgcaatggcgtacagatgggctattaacacaacatgttaggatcaagtttcaggttccattagatatgtggaaagttttaactcagacttaccagtagaaagccaactgttctctgcatgtgcaaaaggcgcaaatggaacacccgcgtgtgcactccgagcccagtcatatgcccatgtggacgcaacatgcacgatggctaaaacaagctgaatcttcacctccaacgccgacccagcaggaataaacccaccatcggagaccagaaggaaaggcagagcaacaaatccgatcgagtaggtcacaagacctgccatgatagacagtcccccaagagcaatatcccaacgcagatgctctggaatcgccttgttgacagaagggagcaacacagaaatctgctgagagtgtccgatatgccaccgattccgctgtttgagatgtcccgcgagagaagtaggaacgaggccgaattgcaaaacctcttgtacctgcatcgtgcgctttcccagccctcgtaaaatcaacgatagctgccaatcttccgagaaagaataggtcggatatccacctgcgtcgagaatcgcgtcgcgacggaagactgcgcctgaacctgcgtctagcgcatgaccgagaagatcgagttctgtattctcacacgtgtagaagtaagcccgcgactgggagaggggatcgccacagggcagattatagaaatactgtcgcgtggtcagtaatgctgcctttgggtcttcaagtagatggggcagtgtcgcgcgcagaaactccggcatcaggatggagtctgcatcgacgactgtgcagaactctggcgggtcttcggtttgcagggagaatagggcgtagttaagatttcctgctttggcgaaggattgcccggattgcttgccgcgggtgtgataggataggtgagtccattttgtggcgagttttgcaattgcgtcgtgcaagtcagttgacgctccatcatccagaaggcggactcgaaaccgggaagctgggtagtctaaaccacatgctgctcggaccgtgtccaggatgatttcgactggctctccgcagcatgttactagcacatcgactctgggcaggttttcgttgctgcgtagtctcttgcggagtgtctgatgtggtggctttgtcgttgcggctagcgataagcgttggtggtttagggaaatatctaagaagatcagcggatgctcatcgttctttcttggaaggtaacgtacgagcaaatagaccctcaactccgagcattaaccacctttgccatgtttgctctgggctcatcacggtgaaaaatagccgcactgtaaagtagatgtaggtggtccatattgctgcttgcgctatacggcggagatatttccgatacttctgcgcatacagagcgcgatcatcaggggaaagctcctcgatgtcatagacgttgttaggaaacattgaagcgaacttgaagccgtcggtttgtgccgttgtgattctgttgcatattatacagatgattttctttttgcgctttttgactggggatatcaagaataccacgaaacaatttgtcttggaattttcacaaattgaccctaggcttttgaaggaaagccttctccgccgaaattaaggggtttgaatgcattcagggctccccatttgcttctggaacatactgtgtctatttatactactccgtatccacctggagactatcgctgccgagaaccaatcagtgcaccccatggtatggattttgatggcgctagccttaattggccgtaaactgcaagtgggccatttcctcagcatccgattggatccctattctataaaattctgagatagccggggactcgctatgaatatactgtctgaggtaccaacagtgatctgattcggtcggtcttgtcaatagaaaaagacgaatatagaatcccaaactgtcacaagtgataaaagtacggctgatcaagggcagatgacccgggtagcacgtagccggtagcctggcggtatctctttgtgatgatggcatcctccttggttgccacaccgtatcgttcaacattccgatacggtgcgatcaaatatcccccgcggagagctggaacccgaggtgacgactcgacacaagcaaaatgttgcgaactgaaggtctcatcacctcggtatcccagtcgcacttgacttggccgaagagagcattcatctaacgaacatatttgcgatcaaggtcttatccccgaatgtaatcattgattcttcacgagactcttcagagaactggttctcacaggtatttgcaaatttaatatgaccaaggctcaaccgatcgaccatccgtcttatcaatgcgggcagctccaaatggcccagcgcagttcgagccattgcatgtgcctcttgtgatttattaagaatatatgttgcctgagggtatcataaattagcacatgcttaagcaggcaaccttcggtgaacatatagttgtagactgagcattaattcaacatcaacatcggtagatacaagtgtttactctactaccaaataagaaaaaggaaaaagcaggaacttattagtatcgagagagatgtatatgaaactataaaaaaagaaacaccgtaacaacgaaacaacgaaagggctgataactcccatgccagtaccctatgcctaggccacgccagcgcatataggttggaatgtgtatgtttatatttcgcggactgagcagatcgaacgccggcagccggggttacctgcatgttgaatccgtgtgagcccactcagccactgcggggactcccggttaggaggaaggtattgctgtgaaatatatcggaacatatgcttccgaaaagggaaggtgggccctcacgggttgatgcctgaatataatgtttctgcctgcagatcacacacacacttattagtattagaatgtacatatgtcctgccacaggaagaaagataaaagcaggagttaatgggtgaaaaacaaaaaaaaggatgaaaggggtgatactcccatgccagtaccgccacgcccaacccaacggcttaggaacgcatatgtagaatatttataatcgtgggctgaacgccgacagctggggttacctgcatgcttaatacgtatgaagccactcagccactggggggcggaatttcgaagaacaggtgttggtcctaaatttataggaacctggagggcatgtccttcctaaattggaaggtgggtccatacacctcatatctttcgttcttgatgttcctgcatttgtgacctggttctcgccgatcgaaagaaggggacaggcgttattgaagaagaagatgtataagaaggccgcggggctgcttcatggatctatagagagaatccaaagatttcccgagaccttgaaaccttctgtcgtcgtagtccaatagagttctgtattttacaaaaagaagagcgttcttttggtctgttcacccacatacataatatatagaatggtggcagaccaccaagatacggatggtgaaccggcatgcattttgggaggcttctcctgttaggccttatcataattaaattcatgaatattttaacaatcatttggcattatcggggtatcatacttcctttccaattcagatcaaaagtagtatcaaaatccatagattagacatgtgatcggctcgatcggaaccccgcccgatacagacggaacggaatcaatgcgagtcgcgattcatagatagataaagaaagccctgggattcgcacagaaagatgaaaaggaataatttaccatttgaatagcacataatatcacatttgtccatcatttgccattcctgaccaagaatcgttggtcattttcgaaatgacctcaaacaacccctcataccttattattggcgcaggtgtctttggggtatcaaccgcctatcacctcatccagaagtatcccaatgcgtcggtgactttggttgatcgagacgcatatgatgccgagtcgcgtgtggctgcctcatgggattggaacaaggttattcgcgccgattacgacgacaaggtctactgtagacttgctcttgaggctcaagaaatcttcaaaaatgaccctctttggcagccatacttccatcaaactggcgtttactgggcgtgccgcagcgactacgcgcaaactgtcatcacaaaccataaggaactcggtcgcaatgacgatatcattgctctccctgtttctgaagctagaaagctttatggaggaatctttgacaatgctgattacaccggtgttaaagaggttctggtgaacagagctagtggctgggctgctgccggcgatgctcttcgagcagtgacaaagaggtgcttagaattgggcgtctcgtacgtcaccgcatccgttactagccttgaattcgatgggcatggctcctgcactggtgtgaagacacaatctggagagacattgtcggccacgcatgttatcgtcgctgctggggctttcacgccgactttgctagagtggagtgctgtgaagagcggcaacgctggactacgagctggagagcgaattcttgcggctggtattacgaccggaatggcacaactgaacgaggaacaatacgaaaagtacaaagacatgcctgttggcttccagggctacacaccgaatgaaggtacgctttccgatatattcgtacgaatgccactaatcattcccaggaaaacccttcattggcagcattccccctaccaaagaccgagagctcaagtggtggggatctaagattttcacaaacactcgagaggtagtccctgggcattacctctcttctcctccacccacgaatgactacaaccagtggaaggttccaggacctctcaagcaggatatcgtagaggccaggaatctgtggtatgggcccgaaagtgcaacatggcagatgacaaagcaccggatttgctggttagtgcccctgacaacacattgattgattttctaacactcgaaagggacgctttcaccacttcctcggactttatcatttcgcctcactctgcctctaaaggactatacgtcgccacttgtggttcattccatggatacaagtttttccccgtacttggcaagtatatcacacagatgcttgagggagaattggcgcccgaattgatagaaaagtgggcatgggatcggcagcggcctgactcgtccgacaacgtggagtacccaaactctgagatgaaacatttactgggacctacagcgaagctatagaggaaattggataggcattgaccagcgcgcttgctggggatcaccaaaactccattatgatacgcttgataagacatgatatgattttcattgacgttctgaataactacttaatatcataacgactgtttgacattaggtttacagctgatctagaagattcctcttgcataatatccgttaatggcaattaagagattagtacatggagcttattgtatattgagtcttacaaactcggctgctggggtaaagtttacatcctcgctaccccttgctgcggaacagcccgccaccgtttcgggccaacacatccgagagggaaaatctgccccgagcgctgaaagagtcgcttgcacaggagcttcaagccaaaatacttacccatggcaacctaaatcaatccaaaatcgtgattcagggcgggaaaatcccagggatcattgactggggtgctgcgggttctagtactttgccctgcgatggccagccctcgatccagagtggcgcgaactctcttcatatatcctaccgccaggtgaatatgaatattcgaaaaatatcgactgctgcgtgtatggcaacactccatatttccacctagcgtgagaggaaataagcttaaacttcagagtttgatccacggagttccattgggccctgtcggagacattacctaatcatttgtatgggccgatggatcccgaggtcgggttatcggcacccaattcaaccgggtggatgccattcggcgacttttgatatcattttacagggccatgtcgctgaatatcctgatgaatggatctatgtgtcaaagtgggattgtttctagggtggagcgttaaatttcttggatatttcgcaacttgtttgcctccagaatcagatgataaggcacatcaaaagtttccgatgataaatcaatcctcaacttccccactgtagatcagtacataaatcaagccacccccccccctgcagaatggaattgttcacacatataataaatatattcaataattcatacctagcatcatcaaaatgacctggcctgatgtctccgttaagcccgccgagggcatctcatacttcacccctgcccagagtcccccggcaggcacagctcgcaaccctcaaacgagcggaaagcccattcccaagctgttcgagcctatcaccatcagaggagtgactttccacaatcgccttggtgtatgcaattcccccaattccttccataatcgcacagctaacaataaccctccagttggcgcccatgtgccaatacagtgccgaggatggccacatgaccccctggcacatggcccactacggcggcattgcccagcgcggaccaggaaacctggtcatcgaagccaccagtgttgtccccgaaggccgcatcacccccggctgcctaggcctctggaaggactcgcagatcgcgccgttcaagcaggtcgttgagtttgcacacagccaaggccagaaaatcggtgtccagctcgcacacgccggccgtaaggcctcgactgtggccccttggcttggcggcgttatcgcgaacaactctgtcggcggttggaccgataacctcaaggctcccagcgccatccccttcaatgagggcgatcccatccccattgccatgacccaggacgatatcgccgaggtcaagactgcctgggttgctgctgtcaagcgtgctcttgctgctggttgtgatttcatcgagatccacaacgctcatggttacctcctctcctcgttcctcagcgcctcctccaaccaccgcaccgataactacggtggcagcttcgagaaccgcattcgtctctccttggagatcgcacagttgacccgtgacactgtcggtgaggacgtgcccgtcttcctgcgtatctcggctaccgactggcttgagaacagcatgccggatgagaagggctggaagcttgaggacacggttgagtttgctcgtgcacttgctgcgcagggcgctgtcgatctgatcgatatcagtactggtggtattcactctgctcagaaggttgcctctggtcctgctttccaggtccctcacgctatagctgtcaagaaggctgttggggataagatgcttgtttctgctgttggtatgatcaacaacggaaaattggcagagaagattttgaacgaggatgacattgacgtcatttttgttggtcgtgccttccagcgggataccggtctcacttggcagtttgctaaggacttggatgttgagattgccatggctggacagattcgctggggtttcactagcttccgcaatgcgtccgagtatattcagcctaactctatgaaggcttgtatttttgattagatatagatacaccggctgttgactttaccggcttgtggccggcttgcattgcattcactatagatatgccatttttttttaacaacaagaacaatgagaattgatatgtttcttcatgagacctgtgattgattagaagtatgagaaatttacttcagaaacgtcacgcatattggcttcgtctctctcaattttcttggtggtccttttcgttgccgcctgttcgttgtcttacgtattcaactacaacaaagattgttccaactaaaactaaacatggaaggctaccaagaagaagcgaggatatgtgaaacgttttgattgaattctaactagtctaagagcaattgtgtttggttatctttcattgggaacatgtggcaaagagcgatctgtttcgatgggacctgatgacatctggagctccagcgctatgaccccttcagcgtacatcgaaaaccagttatatggttctcaacggacgctgaagaggccataaaactgcagatccggacaatcgcctaggtattcaccaagggaagatgagaagtgatcccctattcagagcagccatggtctcaacaaaaagaaaatccccctgggagaacccaggggatatagaataaaaaaacgctacgtcactgcttcactgaacactcgcccgaaggtcgcgacccctcgagggaggtccagttcagcaggtcggccacgtacccgccaggctttcaacaaacggttgcgacccgtgatgcatcagccgtgctagaaggatttcttgcccgcttcctgaagcgctggactcggagccaagtccagacaggttcagagttccacataaagtgacctgcaggcgtaccttgactcgcgccgtgctcgcttgggcatcggaaacacatgatgtttcgcaagcggttccataaaggggccgttgcggctgctcctctggtgtctcgcgttgctactccaacgaagcgaaagaaatgttgatttttgcttcaacttaggtttgttcggcacaaagaacaccctcaacagatgtcagcaggattgaaccaatataggtactgatcctccccatgccttccatcatacagtcccgctggaaatcccgctgtcctcccaaaggggcctgcaggtttggccagttaaagactgcaggagttgtagcgatggcctcccataaatcccgtcgcatcgactctgatcaacgatttcattggattggaacgcaggttttacccctgatccgcaccataatctcaaaacgatactcgggtcgtaagagttgacgctttatgtactagacaaatctgagcacagtaaagcccggtggatcgatcttgagaaacagcttcgaattccctccccaatcacgccgcatgcagagcgagcgccatggcttcccgaaggcgtgctgccgggacgtcgcaagaagggccaattagggagttgttcgaggcatgtgactcgaagaaagaaaccccccctcatggggccaccagatccacaagaggtgcctatagtcccaaccaatgatacagcgccccgaatatctcacgctaagttcgagagtttcgagtgagtcttgaatggaacctttcgacaatgggacaccaatagcactgatcagaagaccagtgatcccatcataagacgtccaccggcaggtattccaacgagtctcggtcgggcaggacaaccgagatcaaggaggtacccttcgacgaacgtcctatcccaatcagcacagggctgttcataacggaatgggtgagagaactcctctatgcaggtgcaaagtgccgatgaggagactcaatgacccgctgcttgggggacaaggccaagcaggcacggttaggagaactctagagagaggaagtaggggattgggaggagtttatattcgcccgtggatgcgtcccgagatttcgcgcctttgtcgattacctaagcattgccccactccagcgcgtcccgacgcgtcgcgacacgtcgaaactaacttttaaggcttttctcacattcatcgtcatatcgatcctttctgttccgatttttttagtcattgatagtggacaagctccacaaaaagacctacactgcaagtacggagtagtctacagagtatatttcaggaaggcgtataatctttgctatgttttttgccctaggttgctggttatcagtgtccggtcagagtaattcttatttttcggtgtatgtgatagggaccaaaagtctcagggaaaagagcgaacacagtgcttgccaggattttcgtaagtcttctgactttcgcgaacgtccggcgtcagatattatcattattccacctccaaacaagaaacatttactttctgggaatttaaacagctcacggcaaaacctccttccccatccaatcccaacacctccctctccctcctttagcctcgggtgataaccccacaagcacctccaacagcttgtcggctgcatcggccggctccagcatttccctcgttccccaataatccttggtgaactccgtgtgcacagtcccagggtgcaaggccacagcaattgccctttccgcactcttcgtgcgcaaatacaaatcaaaagtcttggccaattggaatacagctgccttacttgcacggtaggaataccatccgcccgatgcattgtcggatattgagccgactcgggcagccatcattgcataaatggcatgcgagggcagcccgagcggcccttgggaattgattgcagagctaacctctattgtcgggaatttcggtgcggatcgcaatggaacgaattgggaaagatgcttcaggagtagcaacgggccgagggaattgactttgaagctctccagcgcattggcagcatcgatttggctaggcgatttttccgcatgtaaaatgccggggattgtcaatccgagcctgagtggtgtgttcgggtatttctggcggattgtgtctgccattgctgatatcgtagactcatctaggaagtcgattagcgttctgatgcagagaagaatttattttcgaagaattaagttgctttttcttacctgttacatcaacttggagaatacggagcctctgttccgcgtcttttggcatacccttgcttgccagcagtcgttctttaagttcatcgcagttcttgcgggctgttgcgatcaccgggagctctgtccgtgtcaggagctgctgtgcgaaggcgaaccccaatcctcgcgaggcaggggttactagcgcgaatccatgagctgccgataacataacttatttgctgaactagtttcgctgatggtatatgttttagtggtgagggatagtggaaacaattatagcaaggagttgctagttaatgttcagcgtatatgtgacgtcacaaatcacaggtcatcgatttaagcttcgatctgatctacatcgtgaggctacaatgggtctaatttaaaacaataatcgacatgtgtatactcagtatttatgacttgttttagattcactctttatctcccaacaccctcacaatctatctcagttctttccctccagaccaacaaagcactctctgccaaactcgttgctgctatcattgaaacggaatttcctgttgagtttctcaatcttcttcatgtcttctgggctcagcttgaaatcccctcccagattggccctgatcctcacaggtgttttagacttcgacagcaccgcgtgcccctgcgtgactgcccaggctgtcgaacaactgcagttagtatcatacagactaaatccatgcagattccacttaccaagagcaacctgagagggggttttgttgtacggcttgcctatctccgccaacacaggctcatcgagcagatgggcggggcgcttcccagcatagagagagttctggtttccaaacggcgagtagtgcatgacaagtataccctgacttcgattccattcggtgaaatcatgctgctggagccacggatgacattccatctggtgcacagcgggaacgacggaagagttcttgatcaagtgctccatctcggacttgttaaagttcgagacgccgatcgccctcgccttgccggttttcagaagctgttccatcgctttgtacgtctgcttttgtgtcaacggctaaattcatagatcaagatatgagaatgctgcatacgtcggcaatgtcgatattcaccatgatcggcttcccatcctttaccggaaagagttcctcccctcgttcccaggccacaggccagtgaatcaggaacagatcaacgtagtccatgtctagatcgtccagggattgctgcatagccgatgccacgtcgtctgggtggtgcttgttgttccatagcttagttgtaatgaagagctcttcgcgtgggacaccgcttttcttgacgcctttgccgacagccttctcagttgcataactagtatacagtcagttctgtacattgagttcgccactcgtctcattcgggaagcaaagctgctcacacgcgtgcagtgtcgatgtgacggtatcctgccttgattgcttccgctacggcatcttcctgtgcatccgcatcctgccaggtgccgaatccaagggctgggacctcggctccggtgttcaacttgaattttgtgggcatcttagattgattgatttgaatgacgattcaacagttcatgttcggctctaatatagagcaactccaaagcacatccaaatcctgacatgattatcaaagacacgtcaaggtgacgaattcatgtttgtgcttgtccggggtgatgacatgaaaatgatgttttcgcagtctcagagtaccactgacgagcgaatgatacctagaatatcgccaaaggcgcgttcgtgttcatagtcatatggtttcaataccctgcaagtagcaatatattagcgctgactatgcatctatccattaacgtcttgcccaccttgatttctctccgactcatcacgagcacgaaccttgacgatggatcagtctatgaccttctcccacccacaaagcaatcacgctggcatcttacggcttctgacatctccgacagccacttaattatccagaattacaaccgccaacgtcatcataaacaatacggagtacttcttcccaaatcatttcggtctcggcacgctcctttgcatcggagccctctgcgccatatccaccatatccaccatctcatattcaagaatccttctcatatcaatcctcacgacgatcaaaattacttccagctgaaaacgaattccttcatcatcgcgtcgttcctggacgaaccaccccgcagatcccaagcaaagatggaaagtacggccctgagccagggaagggctcagtggtagtgttccacccttagatacaatacgaccaccgccaatcttcgcaccgcatatgctcgaaactacaacagattatattctagaagaaggatgagctcggcctgctggctgttcagattggcgaagcacggaacgcagtcctaacaacaccagatttataaagtatctctctaaagaggtggaaagtattcataaatttgcccacttaccgctacgtaaggagatttgggtgtactataaccagcataaccctgggcatgtggatgtctttcatgagacgttgatcacgaaagatggtttatgaacatggatgcaaattgccatccaactgctcggaagaggcgaggttaagggtaacagtcacaaagacaacacagacacctgcatggggacacttgccagtgctaatacaccgggtttgaagtcgttcaaagcaaggcttgataaagaggattagaacccgaggggaagtccctcctgcagctccaacagcaccattggaatgacttggtagaacagaacagtaatcatgcagtcagaatagggtcaatgacaacaagttgcgtagcttccaaaacacgagttacgtaggtctgcggacagagtaatgacccttatccactcagtagcccctttatgacgagccataccattatttttttgcttttccatttgtatctccgttttcagtctctggtatgggaattggccctcctggggagttctccagtctcgccgtcaaaacctcgacgcctgtttctgtgacaagcatagtatgttctatcaattttgatgttagtattgaaatccatctctaaaaggtctatgcgcaccaaattgggctgagcgtttgccgtccaccgtggcgtttgtccagtcatctggccaagtcatatctcggttggttcccagagtgaggataggttcgatcgtgaatgtcatcccgggtttgcatgttcccacggccttattcttcgcgtagtggggaatccaaggaggagggtggaattccgagttgataccgtggccaccccaagtcttaataacggcaaggcccctagaggctgcgtgtttctcaatgatcttaccgaactctcgaatcggtacacctggcttaattatcgcgatagccatatccaaggcctcacgggtcgtttcaacaagcctgatcgattccggatcctttttatcaccaacatagtaggtctcgttcaagtcggcatgatatccaccatggtatagagaaacgtcgaggttaagaatgtcgccatcaagaagaactcggtgatcggggatgccgtggcatacaacttcattcggagatgtacataccgacttaggaaagtggttgtagttaagtggagaaggatatgactgccttacgctttagcgaacaatttgataagttcacataggagtaaatatcactcacctctcgctcaacgcaagcattatggcaaatttcatccaggtaatctgtggtcacgccgggccttatcgccgcagcagttatatcgagtacttctcgagctaacctacacaccttacgcatggcgtcctggccctttgcatccaacaggtcccattttgacctactcaggcgcatctcacgctttggaatgccagtcacggcccagtcgggatgcttgattgttttaggcactggtcgtcgcggggagagtggatatacgggtctgacagagcccgtgaacgggtatgtcggaaaggggtcgtaaactccgctagctatatcgcgattagagaatacagtcacgagtaacttggaggtagttaccattttgtatcttatgcaccgccttgtgtgtggtctagatacggatcaatgttaggttctcggtaagaagaggtccgcgtggacgtaacctacccaatttctcttgaagcagtcttgagcgcagaagtaactacctttgatgcccagctttagacacgttgggcattgcaaggtcccagcttcattgtcgcaatcggccccagagcacgtcccatgatcggacattgttgcgaagtgaaattcgaccttgggtgggccataagagatgggaggagagttgtgtggaaatgcgcgaaagatttggccaggctaatgtacctgaatagaccgccttttatactccgtactgtcttcctattaaatatactgccgacctcaacacgctaggtcgtactccgtataggaattttaaaccggcgtagctggcaggtttcaaaaggcggtcaatttaggtacgttccttggacccaatatttcggaggtcccagtggcacccattatttcaacagtgtttacccccgctataggcccaatggcacagcttatcgagaacctgaaaatcggcggtaagagtcctagaatctgatgtttgacatacacatttagcgacagtataagctaatacctgcttttgactcacagatgctggagtcgacatccccgttctcgcccccgcagtaaacggaacttcaaaagaaacagaggattcggacgacgatgtcgctgaagataccccggcagtagctgttgagaacggcggtgccaaaaaaaaagaaaaacagaaagaagaggccaaagaagaaacaacagaaggttcagacggatccaccatcgattcccttatcgcagctattcccgaacaacacctaccccaagggcgaggaagttgagtataaagacgacaatcgatggcgaactaccaacgaggagaaacgacacctcgacaacctcaatggtgacttcctctctgattaccgtcaggcagctgaggcacatcgtcaggtccgtcagtgggcacagagaagcatcaagccaggtcaaacgctcctcgaaattgccaacggtattgaggatagtacgcgatatctggtgggtcatgatggcttaactgaaggtgactctttgatagccggtatgggatttcctaccggtttgaacatcgataacgttatcgcctattatagcctaaacgccggttgtaagactatacttacgtagagtaatatactgaaggtcgatatcggcatttatataggcggtcggattgtggacagcgcctttacaatagcattcgatcctatatatgataacctactcgcagtcgttaaggatgtaacgaataccggcatatgcgaagcgggtatcgacgtttgggtaggagaattaggcggctatattcaggaagcgatagaaagctacgagtgtgaaatcaacggtactacctacccaatcaaagcggttcgcaacttatgcggccatacaatccttccgtattctatttatggtactaagactgtcccctttatcaagtcggatgatatgacgaagatggaagagggggacgtttttgctatcgaaacctttggtagtaccggtagcggccgatatgtcgaaggaggcgaggtctcacattatgccctgcgcggtaacgcgaacaccaaagacttgactttgtcttctgctagatctgtcttgggagctatcaagaaaaacttcagcacgatccctttctgccgacgctatttggaccggattggacaagagaagtatctcctaggtgtatgaacttccattacggatatgtgattggaaatcttgactaacaagaatatagctgaataatctagtgaaatccggaattgttgaagattatccccctctaaatgagaaacaagggacctatacggctcagtttgaacacgtaagtcatttggctctccatggctccagggctttctaaaagcagaataatcactaatgaatataagactattctactccgaccaaacgtcactgaggtcattagtcgcggagatgacttctaaacatattcgagttgatggttttatgtctcagggtgcattcaaatagttattgaaataactatcatgattagtatattgacctctccccttctacgcatgacgaatgcaaataaaactcccttggtgtttgtttcctccgtgctagtcatcttataaattaccacctgtttccggcgaaggatcgatctttgcttcagaagattttgagtttcggtgctgatactgcttggcagccggtaatttgcctacaatgaaatcaatttagatggctcctatagtcgcagatcatgtgatctctgaatagcttcatgttgacagataaggtgatccggtgatctctacatagtgttacagtacagttataagtcatgtgatgattgttaatttacacgataattgcggccagcggtagacttacctgaagtagtttagcggggagtgtgaaggattgtgtctgtatactaactccagggataagctcaacacctgaagcccaagctcttcagcttcttacaggcagttggtatactagtctatcgaggccaaattagcctcaaaagtcaccatacttgcatatggaagaactaagtggaaacattgccaagcagaccaagctgtttgatgccgagacaaacaacactaaaggtcacacgcgtctaccgtagcttaccgctttagtttatatagcgagctccacccgcaaatttttttctttccttctgcatcgcttggaattctccagctctcacttcttttgtttttttcttttgtcagcttggactgtgtttaatgatggcacatactccagctatattcatggcctgctaaggctgcgaataatgctcagtttcaatttttccaaaaggtaaggaaaatattcttctatccttctcaatcccaaaccccggggatgattatattatagacatgcaaaggcattcctcaatcagaagatccatgttgaatctgtcatacttttaagtttcagccttgtctgacccatcacaacattatcacctttataagccattcattgagtgatctttgactaacaatatttcgctcaggtaaattacactcggattatgtcccttccctccattgcggctgttgcctagcatgaagaaatttgaacgaacgggcggacataatgtacccatctccctgcatccaacaaaaacagagcgtacaaactctgtgggtgtatgggaagtggattacttgttgagaattcgtcacctgaaccattgcccttgtcacaattatttcattttgcatcgacaatttgagaccagtatttctaacagaaattctaggtaatttatcactcatctctttctgcccttctcaacatggtcaaacctatcatgatgaatgtgttattcacactgttggacttggaccttgtgtccgggaatgaacatttatacaaaaatctgatttaatgaggtatgtgttgcttgtcgattgaataaaaaacgtgtttcatgctgactgacttaaagcctgactttagttgccatgtcttgatttcacttttgcctcatgctttttgcttgaatgccaacgctgactcgacataagtgaacaaataggaatacccacaggtgaccatttggctcgttgaccgtgagtttattctccttccattccctgtctcattgcatgatgaaccccaatatactgttctatctctgaactatcatgtcgataaaatattttcaccttggagaactgatcttttccttgtctgccatcatttcactcaacttgtgatatgatcaattgctaatatgcattacaggagccatcggtcatttgtaatagcctaatatcaaataatgaattttctcttctgaacatctgaacactccgcgctccaaaactcccggctttcccttaaattctcgtagccactcgctaaccctttcctatacacttaacccccacgctcattggatgtccctactcgaaaaacaaaccatgcttcttgtgccattgctcaagactatcttcaccgtacacatcgtgcacactcttctttccctctggccaccgcgcccacgccggcttcgatccatccatgatgcacaccatctcgtcgggcaccggcaactcggtatcgattgcggaggcaaacggatgaatcagttcaggccagtggtggtcccaaagccacagcatggaactgcaattcgagcagaagttccgctcggaggagcaaagcttctcgtccggtgtgccgcgatctttgatcccagagtatttcctggcgatgacgttagtaaatatgcacttggtattatgggattataattctagtgtataacatgaaagtttctcgatgggtgttatggtcaaaagtgaaagtaggtggtgatataggtcttacttgatcagatctttgcccttgatgatattcaggctatcggcgatgccgccgaggttcaccgcaccgaggtatccgcctactttgcggcagatgctgcacgcgcatagctggtaaggaactggtgtatgggattgcagggtaaattcgacgccgccgcattggcagcttccttcgagattcctatggatccggttaatgtgcctgtgtcggggatgcaaggcagtactgatgaagcctcacgtacataggcatgatttggtgtgtttgtttgataggctttgagaagctagtgagtagtacgagtatatcaaatagatttttcgatagaaggttggatttttgtccagaattaggatgtggtactcgatatatatacttccatcgaggagagataacaggtttaacaacaaacccaacaaacagagcaaactgcacaggcctcgtatgatcaaaggccgtgtccaactctagacagcggattttccattaatagagctatatccgaatgcccgagtccaattccttaaacgccggattgatctctgcatcatcgacccttcctcgctactgtgattggctgaactactgtttgtcttgtttgtcttgtttgtctctcggaggtttcattcactttcgccgactgatactcatcttgctagctactttctcgtcagtaccaacgcagaatccttttctgttgatattttgagcggatatacgctctgtactttcggaaatgagtttcggagcccccggcggtgggtcggtgaactataagccatcaccgtgagttggattattccaatcgtgcatatctgtgcttgcaacatgttgtccagcgaatgaacgagatcggatctcttgctctgtataattgctgactcaatggaacggtttgcagacccgagcgcggtagctttcctcttgatcacgaaggtacgccagcccgcagtcatacggtccatatcccgaaggaactcggcaagaccagctaatccgatagagctaatcaaaatttgggacgctttaggggaatgcaagcacatcatctcaggatacctgaagtgtatcaagttgaacagaggcaccaacgacgaggcatgtcgcaaattggccaaggaataccttagctgccgaatggacaagtaggctaccccgatataccgaggaccaggcattgtcaatggatgaacaattgtttttgtgatgaatgtcggagcaaaatgctgactgagacaacttgactaggaacctcatggcgccggataacttcgagaacctcgggttggtgtttaaagatggcgcggggaaagcacagactccagttacaccagctacaggtgcaacaaacccagaacagaagagctgatataggactgcgagacgttggatgatattgtatgatatggaggagtggcgctattccgtgatattcaggtagtgctggcattattcaaggcgttgtatataagaaaatgtatttggtacctaatctaacacatggaataagtaaatatgacctgtgcagatgagaaagcatcgaaattcacaaaattatatcaatctgaaccgcggtggcctgttggctcgccctatgcggttccccgcatgtgaaaccgtttccgcccagccactcttacaatctccaacccatccgagtcccatgccaccaaatgtcatcgatcgcccgaccaccagatccctgcctcgtggcaatcatcctcattgtgcgctctcgaaccgggccccgcctcgtcttccactaccccccgaatcccctcagcgagaaccgcatcaaaaccactaccaggggtggacggcgcatttcgcgcaatcgcacgcgatctaagaataccgattcgagctcgagctccgagagcgactcgacctccgacgaagacgaagacgaacgagaaacccagagccatgctggtgggagttccttgctggcgggtcgccgcgctagcaacttcggcctcgatgatcatctccaggttgccacatcgcctgctgccggtgaaccccaacgacctgggtcgctaggctctgggcgtggttcatcggctcggaaacgggctgcgggcaccgatccggaccccgacgacgatgcggggacggcgtctgatcggcctgaagatgggagctctaggccgccctgggagtcgcttttgggtgtgcctgggagtgtgtgggagaaactacttagtccgtctcggtcgtggcataagcggcgctttgaggttgggattaatgatttggcgcttattggttggccggtttttgtgcgcgaggatggctcatggcgcaagcaaagacgcaagaagcagaagaagccccgtgctgaatgggacggaggggaattgggtcacaatgatagtgccgaggagggcaagaaggacgagcaatttgttatttcgcctgatttgagtgccagtgtcgcttcgattgcggagtcattggcatcaccgacaggcagtaagcgtgggtcgaccagtggacggcctgggaaaccggacgagtcgcttgatccggaggacaaagaccatatgacgatgttcaatgtggtgtttgttgtagatcctcctttgctggagtactccatgcgcgtgaaggaaatctacgagaatatcatcaagaaatttgccaaagctctcaaatgggaacaggctcgtactgactatgtgtggaaggagtctcaacatattctgcaagtcaggagaagagcacgagagacaagtatgctttctgctaatagccatccgccggagctaacaccctggatagaaacatcgacccataatctttactccgaattgatatcccagtcttctctagctcgagctatctacacagtctacagcagcatatcggcatccaaaatcgcttccgtatcgctcagcccagatgtctccatctcgctccagattccacctttgacctctacgtcatatcttactggtcctatggacaaagcatacccaggcttgtggctcacgacagcagacagtgcaacccccgccgacgacccaagtgtagatgaaagcagcacgccgcatcaggtcccagcaaagcactttgctctacttctcttagacagtgaagccgccattatcaaggatgtcgaagcatctgggggagcgcttgcccccgcacttgcgcattatatccgatgctccaagccaaccaagtcatttgcgcagatatcagtctcatccggaatcccactatcccatatccagatgctgtcgagtcatcttgtgtactggcgtcgtgctcgcgccatccctccaatccaccaacgagacacatacatcgtctctccaaactgtgacttgagcaagcttgaaatagctacgattgcttatcagacagctttcccaacataccctagtttgcccaaaatgctttccacgctcagtggcacccctcgcccttatagcaacttcatccccagcaaagaccacaaagagatatacttcactatcctggcctggctactgcgcggcggctgggtcacccagctccgcactttcgcgcgaatcaaggtctcacccgaggtcaaaatggccgtggagatggcgctgcgcaaggaggaagtagagcgatacttgtctaggggcaactcaaactcgatctcggtcgatgaggacagcgaccctgacagtgaaaatgacgatgcggactcttcctcgtcttcttccctcgacagccacggcagcggggatgaaacgcccatgcctagtcgactcgacccacacgcacaactgcgcttttctcacaaactcctcgatcaatcaacagctctccggctgtcctctttaattccctccccgcaccgcgcatccccactcgagtcccgctggcttgacgaaatcttctcccgattccccgacactcccagaaccatgcagggagatggaaactccagtccggatgggacgtctaatgatacccaggccctgcacaagaagtactggcctgttttcctcaagtatttcaatggctacgatgccatggagaagatcagcgtgcgcgagaatctcaagcgcaagctcgtctggcaggtccttatgcgcctgggcttagtgacgggtccattgggcgctatggatctcgatccgcgtgaacaggtgttagttagttttcggcactggtaggtggtgctggtatgatgttgatgtagagtatgaatatggaacatgataactatccctcttttacatggacgtaggtttccaggtgtcggtttatatcttccggtgaatcccactacgtagtatagatcagacacctgaggtatgttattttcagtgtaatacagcccgcgtattctgattacatacccactctgccattccgatggtttccgcgtgccctcagccctaatcattgccgaaagcacaatgtttgatcatggatttagtaggtgaaagggaattgaaatggttcgtatttgagttatttagtttaattgggttgatggttctagtatttatatgaagatataaaagaatgacagtgttagggcaaaaatagtagcagttcattcacatgtaaggttggaagcatacaattatatcacattcttttcgcacaatgatcagcacggcagtaggtaattttttttcccgcaaggtatgtaatataatatgcaatatttctccaaatgtattgatatgtattacgtttaccctgaggatttcatcaccggcccgcatatccgaataagcaacggtccaacgggctgaagattataggatagcaaaattattgggttgtagtcgggcatatgtagactaaagttggtgataatatctgtcagtagtatggtattggtgctaggatattttgtcactataagaaagtagtcattcaaagaaaagctcgactcttcccatgttagatatttccattgtgcgccaatggccggaggagctccggtggtccccgcgaggtttagatgtattttttatgtatgtatgttttgccttagattgatgagccgaaagttgatataggtattctgtggtattctgtgggatatctaatgttagtacctgaagagaaactttatatatagagtagaaggtctttgatggaaggtttctagccagaatgccatagtgctatccaattggctggacatttgttgcttaagacctcagaaccctgaagcatcgccacttagacagctattttaatcatgggtctcctgggctggggctgttattgggtaatgccatgtgaagaagcatgcggctcaattttatgactttgaactggttctttgttggtttcatagactgtataaaaagtacattgccgatattgctgacctcggcaaggcaaatacacaactagaaggggacatagcatatataagacagggtattctaggggttcattctgcactgcgtaagaagtatataggtactataggaatatacctctagtacagaatcgtctccgagatgcccgactcctctgtatataggactatatacagggcagtgagatgaatgagaaggaatatagagattcaaagaaatgagccttgaacaattaagaaggtaaatccaatgcaaaggaagtaaaacccttttatgcgaaattccacattcaaaaaaacaaaatgtgcccttcaaatattaattacgtgtaaagaaaaaaccccgctaccagttctgccctgaaccaaataattttgtgtcttctctctcttctctcctacaacttctccccctccgcatcgggctgttttctcccttcctcttccgcgacttcctttcagattccccttcggtacctctccgtctcagagagaaccgagatacttcatctgttccgaaccttcccacgtgcgaatcgccagtcatttttcaagggatcgacactcagcaattgatcttgtgcttcacatccaggttatcgaatcctgacaggaattacacagcgttcctgtgaatccgacttgcaccactcagcgactgagcttttacgacccttttcagcctggagacgttgacaaggcagtgccttaatcgcgtcctcggtgggaaaattttccttaactacactttcctctttattttctgacaacttgtgtgctcacaagtcacggttgttgaaatcagcactccacaacgagaaatcgtcgacccacttatcaatgcgatttgtggtctagacgatcctcaccgatccaactccttcgattaccctttcgcgacccgatacttccgtggtccttcgtcgagctcgtttacacacgaatcgtcctttcgacacacaattgagagtctctctgaaaagacgggaagctgcagattagtggggtcacaagaagctggaatctttccctttcttggtttccactttgcgcaagtgccatctcgcccccagtaggcgtagactgagatccagagttacccaaggtcgtccggtaaaataaaccgcacctcaaatttttttccccacacactcgatcagagctaccataagctctcaatacgacatgtctacgttttcgtacgcacaagccgccaagggcgtctccgggacaccggccctgtctaagacaccatcagaatccgagaagactgactccaaaccggaggaacacaccaccgtcgagactacaactgatgaagcaccggcccccacagagtccgagcccgttcaacaacccgaggtagtcgcagaggagaacaaggatgatgatttcaccactgtcacgaacaagcatgccgccaagacaaaggctatcaactctcgaacatcaagcccgagcgttcgcacaggctcaaaggcgcgcaagtcaaaggaggatgattcccatacccctaatggcaacgcagatgccaccgctgagaagcaggctcccagtgagggacagaccgagaaggccgaaggtgccgcagagaagtccgctgaaaaatccgaggattccgagaagatcgcatcaccacccaaggagctgaaggctgctcctctcccatcagtcaacatttggcaacagagacgagaggcccaggatgccaaggtcaaggctgtccccaaatccacctccactagcaaggccgcctccacgaaggccgcctcgactgctgatgagacccagcaagactccaagaccggctctaagaagaagggtgccgatggtgcacaggaaggcgccaaggatcgcaagaagaccgatggtggaaaaggacgcgatgccggatcagttcccccagtagaagacgctactgcatggcccactccccaagttgcgattggcgaagagaagaagaagtctcacgaaaagaccgaaaagagccctgtcattagacctcatggaaaagaaaagtggacaccagttccttacgttcctactgctgttttcaacaccccgctcccatctgctggtggtcgtggaggtagacgggctacccgtggtggccgggacagcggccgtggagctcatggaaatggaaccgctaccaccgataaggctgcctctggacaggccgcccaaggcgcaaagcagtcacctggagaccgagggcgcctcgagtctggatctggacgtgccgcttctcttcccgcgcaatcgcgacggtccacaagcactgatgccggtgccacagccgatgcacgcaaggcttcccaggcacccgagcgcggccgtggtgctcgcaacggagaggagaacaacaagcaggtgaatggtggcgagaacggcccccgccctcaacgcgagggcaagcccattggaagaagccaggatgcccgtgcaggagaccgcaaccagaagggtgccaacctggctgttgacttgcaggctgcagcccgtggcaatgaccgtcgcttcgaggctggatccaagtctgccgaccccaccggtctcactgactttagccgtgaacgtggagagttccgatctgagcgtggaggtcgtggatctaaccgcggccgtggtggtgcctacgccaacttcggcggccagaatgcccagttcaatgcgtctatgtctaacaacccattccctgcgcctaagtcgttcggcttcaacgagcgtcagcggtcacaccagcacggcctccccaatggagctcaacaaggaaaccgtatgcccctccgatcgccctctgtgcccactcccgcaaacatgtacggtgttgtttatcctttcccaggtgatatcaacacgatgtatggctacccagctgccccgatgagcgctgttccctaccagcaatatgtggagcctttctcgctcatgaatatgctctccatgcaattggagtactacttctcggttgacaacatgtgcaaggacatgttccttcggaagcagatggattcccagggctttgttcctctgaacgtccttgccagctttaagcgtgtcaagtccctcactgaggactttgagctcattcgtcacgtgtcccgtcagctccgtaacgttgagtgccagactggcgaggatggtgtcgatcgcctgcgccccagagacaagtggcagcagtgggtcctccccgtggatcagcgtgagcctgctgcccagaatgagggcgccgcccctgctagaaagaccgacgagaacaccccggttcacggccactccgagaacgttatcaacggatccgctcgtcagttcgttcccaacggtgtcgcccatgatgtcaagacttcactttcgtctaccgctccagaattcatgccctcattgctacctactgcagtgaacgaaattgccaatgtaggatacccctggaacttcccagtctcccctgatgattcgagaatgtcgttcttttcgtcttcttcgtctttccctaatttaattattgactcttctttctcagcgcgtggactagattcgcagtccgaaccccctttcccctttgatttggaatcgatggtgtccccgacaaggtatgctgaattttttgcatgtgaaatatattatgtgcggtactgactcactgtacgaacagctctgatgcagattgctttcaataccaagtcggcggtactgattggttgatcagcaagtcttttgccgaagcgcatcaaccggcgcctaagtcaaatgggaagggccgttcgtccacacaaacgtcaaattatgtcccaaaaactttcaatatgtctcgcaaagaaaccttcgatggccgaggccgacagatgtcaagaaggtatagcattggaatgacccagccttacgaatcctggtcattcagcttgacaaaaaatttcaattcgcatttgtacaatgaatttaggcgttcagcccttgatgatcttttgactcgacacgttgacaacggtttcaacgagctcatggagttttatcggaactgtttgcttcaccgtcgccacattcctgacctcgttctgtacgacatggtctatctttcacaaggtcaaacatcggactaccacactctcgtctccaatacgatccatgaaaccattgccagtggaaagatgaaattacacaattgggggagaatcagcaaatatttcgatacccaactgggcaagacggcgggagaaaagttatcatgagcccttttgcatttctttctgaattttgcttcttcgcgacacgtctccttctactgcttgttcatctttcatgaccagcattattcttttttttgttcaatacggtttttttatctcttgcatgcatattcgccaacttttctagagttccaagtgaccctttcattgcaataacgcggtctggtttctcggtcaactcgaaccttcggagttttctcacctcctttttttctgtttgatgatttcattgctttttcagtcatgggagattctcaaaacgttctggcgtccgggcatgattttactggcagtctctctttcttttgatgcctgccactgcggtgtgccgggctccaaaattcgttctctttttcacccttgacatagatatttccactacttttcttgtttcctttcccgaggttgtggcttttcctttatcgatccagtcaatttgcgatccaggcctttcatcggctctgggtcttaacaagtatcagcatggcaatactcagaaaaaagcacatgttttaaaaaatatcgcctcgaggttttctgtgtttcgagtttcgtgatgtcaatcggaggaatgaatccagcatatctacattgccgatctcttcttccctgttgaccatccattcggtctaccaggttcttctttggacagatcctttgaagtggattcatccatctcagtgcttttttcttattgctggggttcctgcacagaatattttgttttctgtactttgttttcttgcataaactgggctggctgttcgggtctttgtggagtaatatgattgatatgattgataatgcatactatgcaccaaggcattaaatttgctctgtaaaataatgtgaattgaaagacgtgtttgaaactacataataatgattgtcatctataaaaccgcgagtcgagtctgatggaatgaggtcgatcgttcctgcctcaggcagccagatcttgcaacggagataattcaatcccgatccggctctaacagctccctttcccctctctagctctgttcagcacctccagcacaccgttcttcttcgccttttagcctctttacctttaaatccacctttttatcaggatggagggtgcatcccgccaaacgtcaaggctactccggcctcgtggccagaaactccttccccgtctcacacgaacctccgcagtcaacgccacacccttcacccatattcaacgacggacactgtcgaattcccctcggccctttgcaccagagtctcttctcaacacctttagaaccggtggttcatacaacgaaggacccaccagctatttctccaaccgacaaacacttcccgcgaataccgttgtacgatttgtgccacagcagacagcatggatcgtcgagcgcatgggaaagttcgaccgtatcttggaacccggtcttgcgatccttgtgccgttcttggaccgaattgcttacgtgaagagcttgaaggaggcggctattgagatccccagccagaacgcgattacggcggataacgttactcttgagctggacggtgtactatatacgcgcgttttcgatgcatacaaggcaaggtgagtggttcaagggcggttcttggttgttgtgtgggattggaccaatcgggacaaagcaatcgttaatacatcaatcgtcaattctagctacggagtcgaagatgcagaatacgctatttcgcaactcgcgcagacaactatgcgttccgaaatcggtcagttgaccctcgatcatgttcttaaggaacgcgccaatctcaatacaaacatcaccaaggctatcaacgaggcggcccaggaatggggtgttgtctgtctccgatacgagattagggatatccacgcgccggaggcggtcgttgctgccatgcaccgccaggttactgctgagcgctccaagcgagctgagatcctcgaatctgaaggtcagcgccagagcgcgatcaacattgctgagggtcgcaagcagtctgtgattttggcatctgaggctctgcgctccgagaaggtcaaccatgcttctggtgaagccgaggctatcaagctcaaggccgaggctaccgcgcttggtattgacgctgttgctcgggccatcgaggagggtggcgagaatgctcatagcgctgttggtctcagcgttgctgagaagtacgtcgcagcttggtcaaacctggcacgtgagggcacagccgttgttgttcccggtaatgtcggtgacatgggtggtatgattgccaacgccatggctgtctacggcaaggtcagcgagactcacgcccgggggctggcaaagaaaaccctcggggtcgaagacgcctctcggtcatcggagacatcgcaaaacagtcaggtgccgaccttttttgaggaacaggctgggcagaacacacagtcgaatgtcgcctcgcgaactgccgaggagggatttgaaactgtcgccggcgaacacaagaaataagcatctatacttcaccgaaccgaaacgagaacgacgactcctctcttgatgtgattatatttctttctgcctcttttgttgctctggcacctccgcccagtcagccctagtcttcagctcctttggtatatgggctggctgtttcccagtctcttcgacattcttcttgaattgggctctctgaatttacccactacttcccatctccattacttacctttcccgctcttactgcctattgtcttcctattgttgtccggcatttctttaggagtcttccaaaacgcacgagcttcgctgtgtatgtggcatcgaattcgccaaattggttcctgtatgtgtaaatagagaatttttgttgatcagagagcctgcgcggaaggaaatatctcaatgtacaagtatcagtatctttacattgctttccaggaattgtaggtcggttgtgagacatcggataaaccgggtcagattaaatctttggtttcatcacttgtacgattattgtgaatccagtagttggctttcgatcttgattatgctgccggctattcctcaaaagggtctactcaatgtactacagtttggagatagaggccactaatacaagtgcattgctaacagctcttagtaaaaagttcccctggtcctagttagttcaaaccgaatacaggagggaggacaacgtacttgaaaacgaatagaatcacgcagcagaaaccaaagaagcaggaataggttcaatatcgaacctgatctcaagtgaggaactttgatcccaggtcataaccttagaaatataatatgtacccctcggaaagatctccaggaccagatacaccgcgcacttaccaacgcgtgtacccagaagagcctggtactcgggggtgttatactgccatatcagcggcgcgtcacaagccggaggccaggtcagaccattacgcgatgaatataaaacatcctggacaaaatttttggtattgaaattgacaacatcacagacatataagtgtcgcaaagtctgtggctcagcaatctcctgcaaccgggctcgggcaatctgggaaaactgaggtccgtcacttctgaacatcgcctcgacgatgatcagaccccttccaactaggatgtcatacacattctcacagccagctagcccaggatcgccctctgccaacctgcgcgtcagtgtctggttatatatcgctttgttagtgtaccccagtgcgaaggcattctccgcaacctggaatgggatgttatgcttctcggtttgaatgagccagcgtgcctttgtaagatccgctacggtcagggcgttgggctggatttggcatgtgggatcagtggggtcttcgatccatcgttgtcgtgtagctcctccgtcttggatcttgccgtaccgccgggctggggtggaaatggctgggggtacgtctggggtggtgctcggaatccctaggggaggattggggggaacccaagactgctctgaaggtgtcatattgatgtatcagtatcttgtatcgatcactcgaatggtgagcttcattaccatatatagtatatgccggtataggtgtggtacagatatccataagaaagaaaagaagatcatacaacaaaaacaacaatgacctggaagacgacaaggacaaaggcaaggtggaagtttagacgactgaatcaaaggagactgcttctttgagaggcttgacaaagaatgaagagctctgtttcaaaagctttgtgttcctttgtgcaaatacatacttgtttgaacaagacaaacataagtcgaatgacaatataaagcctgggctttattactccatcgagtctttctctccatatttcaccagacgctttgctggtaattcaccaactattgtccaaagcagtattcacatctctggatcatcgaagccaaccctggtcttatcttcagccgcgacaatgtctcttactagacctaaccacctgagctacgaacagcatttcgagcgagaatgcgagttcttccaggaaactctactcagggaggctgactcgctcaatcggttggaaaaccgccgcgcaggaaccattcaaataatttgtgatctgatcgtccagctggaaatcgtcagacggctcgctgagactatggccagaaagtccccgatgtgtccaactgtcctgattagccccccgggatatttccgcggtgaatttcaaagcttttgccgtgcaaagattctacctggtctgattaggtcgctgacttgccttaacgagtcagacattatctatcgcgatatcaactactcagtcgctgctcaattggaggagatccacgaggactttacttttgtcttggatagccgcgagtagccagattgtcttgttaggattctgtctgctttttctaagttgctggattactctagcaagttagatgcccatttatatatccctgtacagatgttgctcaatgacattatctcaggtgaatatgacctttagtttagatacgtcgtatacgtcgcgaatacttcactgcattggttagaaagataacatggtccattcagttcgtattcaaagttaatagttatctgtattatttccagacatgtcatttcgtggcctatatcgtatatggcctgttagttctgcttgcatgtctcttgtagtcttgaacccatttgctctgtactttgtagtagacactttatttaccaactgataaatatcacatactcattttggacctcacactccatgcaccagtagtctaccatcacacttcaattacatattctaagtatacgtagattctaaataaaacaccgtaaggcatcagatgccggcaatggcaccatccaacgattggtttactgacatacttatttgtgccgttccccccacctcagctaatgtcactggtatattaacctccatccccctcattcttctcttactcttctcacatcctctacatcttatctctaaagcaataacatagcctataaatcatccaccatgtctagctctggaaaaggatacactgttaccggctccggcactaacagccaggtaggtataccccgctccatttcctatgttatatgccaacaacaagataagacatgcattcgttcttggtaattccagaccatcatcaatatgtcacttacaagaggtaaattagggcaaccattattgcactcgcgactacggttccagcgcttctaactcgaacagctaccactactccaatacgtaagctgtctcaatgcatatgataatgcagtgaacgagaacagtttattctgactagttgctttagcaatggatcctactactactccaaccccaatggaagtacctactacaacagcgggaagggaagctctacctacacccctccttccggaggatccggcaagaaataagttctcatgcaataacgtcgacaattgattggcgtatcatgaaggcctaatttatccaaagaaccaatgaatctttctgtttcctttataaagatgtgtagttgtagtgtaagcatatctagtagagaatcctcgatcacttaatgctcgaataaattgaagttcctagtcaactgaggtccagcttttccaaggttctctatattgtttgagttggttaccatagagatatctggatgttttacctcttcttcaccaagggatgaagcccaaagacaccgagaccttaacatgcaagcttgtaattgaactagaaaaataacatatgctggtacttgaggactattgaatctctccagttttttcccgtaatcattcattgacgagagaaggttgtccaggtatacactaagtggccatacttccggtagaaccatgtttgccctgctcactttgtttgataaaatcagcaagcataaaaagatcactgcataatataaaatatttcaatggtagtattccccctcaaaaaaaatcaataagtgctagttagtccttgcagtgtaattcaagagactatcaacgcgggagctcggaccaggcaaatctggagatcgcgacttttggattcacgtccttttaatatccggtctctttgaacctgagccctttgacttctatttcttgaatctgtgaccgaggaatccattcgttttgactcttggtcctgccatgttccacgttaagttcatataatcaccaaaagcctagctccgactcgatacgccgcgccgctcccctccctacccacgctctgcgcacattggcgctgatacgtgtcgcatgacctgatctcgaggcacgatcacgcaaaccttcgagaaataaacgaataaccgtgactttgttctgcggctggcgcgatgcatatcataaagccagtttggctcacccatggaggtacggagcttgatcgccctggttttctttgctcgacaccgttgggatagaaatgcagtgcttctgagagcagaaaaccaaggtatccaacgaaagaacgagtttgctaatgtttttgctctgacacaggtgaacgtaaggatttcgaggtttacagctgcgatgtctcgccagatgggaagcgactggtcacagctgctggaggtgagctcgaccctttttgctttgaggtggaggccacaaagatcatgcgccatagagagaattatcgctgacattcttttgattcgctctagatggatacgtgcgaatctggtcaacagaagctatttacggcaccggtacacccgaacttgagggcaagccaaaacaactggcgtccatgagcaaccactccggcacgattcataccgtgcgtttttcacacaacgggaaatacctagcgtcaggcgcagatgacaagattgtctgcgtgtacaccctcgacgctaaccctccaacacactcatcaacatttggtatgcttcggacacactggatacggagagacaaaagtagatactgacagctatggaaaactattaggcaccgatgaaccacctcccgttgagaactggcgcacgattcggcgattgatcggccacgacaatgatgtccaggatctcgggtggtctttcgactcatcgatactggtctccgttgggctggactcaaaagtcgtggtgtggtctggccactcattcgaaaagctgaagacgatagcgatccatcagagtcacgtcaaaggcatcactttcgatccggccaacaaatatttcgcaaccgctagcgatgaccggaccgttcgcattttccgattcacctccccttcccccaattcttcagctcacgatcatatgaacaacttcgtccttgagcagacaatcacagccccattcgccaattctccgttgacagcttatttccgtcgttgctcttggtcgcctgatgggatgcatattgcagctgctaatgctgtgaatggtcctgtgagctctgtggctattatcaaccgtggatcatgggatggtgatatcaatctgattggacacgaggcgcctgttgaggtttgtgcgttctctccacgactttatgcaactgagccgcccaataagaagcaagccgatgggcagcctgtacctcaacaccacattaccgtcattgcttgtgccggtggagacaaatctctcagtatctggattacgagtaatgcacgaccgattgtggttgcgcaggaaatggctgctaaagccatttcggacctggcatggtctcctgatggaaagtgtctctttgctactgctctggatggcacaattgtggcagtccggtttgaagatggcgagttgggctgggccacggcaatggaagagaatgagaaatcactcaccaagtttgggactaatcgaaagggcgctggaatcacagaaactactgacagcttgttgctggaggaaaagagcaaagctggcgagatcaagcacgtcgaagggagaatgggtgcactgatgggcgatggcgccgaacctacgattaatggagataaagccccacaagcatcaaatgggaccgcacctgctcggggctcttcgccagctcccgaggctacgaagacccagacgaatgggaccctttcgacacctgccgccacagaatcagagaagcctgacccttacaaagccaagttggaaagacttaagcagcgtccaacctacaccaaagagggcaaaaagcggatcgctccattactagtttccggagctggggctggcgagtcatctcttccacaagcccgtttgatggcgtctgtcagcaatcaggtcaaggctgatgccccgaccaccatcgttgacctgtcaaaacccttcgatggcttacccaagggtggcctgactgctcttcttattggaaacaagcgcaagctggcccagatagaaggcgacgaagatggcagcgtcgaaaagcgtgtgacacttgccagtcaaaacggtgcaactcccatcatggccaacactcccgacggccttctaccagctcaagttcaatctgccacgactggtcaacagccaactccagaattcattcgccccgcagtcacaaatccttgcatgtcggtcagccaacttcgtctggcagtccctaaaattcgcagccagattctccgcgcgttagattcgagtgggaaaccgacggaacaacctggccctagtacagactcgggctcttctaagagtcgggtggacgtggttttcgaagcccggaacccatcaccagcaagtctgaccggtcgtgccgtggaccgcgagccagtacgcctgacactgttccgcggagatcaaccattgtggcaggacttcttaccgcggtctgtcctacttgtgactggtaatcagagcatgtgggcagctggctgcgaggatggatcaatctatctttggacaccggcaggtcgtcgtctggtaagtgcgctcgttctcgaggcacagcctgtcatcttggagtgcaatggaccgtggatcctgtgcatttcctccgtgggcatgtgctatgtttggaatgtgaagcacttgtcgtctcctcacccaccagtctccctccaaccagtcctggatgctgcaattcatactatgggcgtgactcccaccgccgctcccgcagtaacagacgcacgcattaattcggagggtcgaatcattgtttctttgtctaacggcgaaggatactcctattccccatcaatgttcacatggcagcgcatctcagaagcctggtgggccgtcggcagtcagtactggaacaccacagacgcacccgtgagcaacttgcaggccaaggatgcacagcaagataacaaggatgcgaaggcagctgttgccgccggcattattccttggttggagcgaaacaccacgaatgagaccctccttcgcggaagagcatacttcctccagcgtctcatcaaggttttattgtcacgcgaaggttatgagactttcgagtccagcgtatcaattgctcatctcgagaaccgtcttgctgctgctctgtccctgggtgccaaggaagagttccggttatacctatccatgtacgctaagcgcatcggtgccgagggtctaaaactgaaggttgaggagctcctaaagggtctcatcggtggtctttttgaggatgaagacgaggacagtgaaggcgtcttgaaactgcaggacaaccagcgcgatggccgtaactggcgcgaaggatctgatgatctgtgtggctggccacgggagactttgttgaaggaggtgattctagcgcttggtatgtttctttcttttttctttgttctttcttctctttcttgacgattcaattactaacgaacgttcatctaggtaaacatcgtgaccttcaacgcgtgacagttccttacgccaagctgctggacatggttgacaatacctctgaacatggcgatgcaatggatctttaatgatgttttctctcttgctatctataccttttcttcttcttgctggcgttcaataagttcgggctgggtcaacccaaagggtttgcattattatctctgctgaggcgggattggagatgataaatctcattttcatggtgtatttgtatcataggttcacttttgggtcgttattatttaagccaacctgttcctatcttgccctagtttggtcttgctctaggatcaaccagacagaccctaatatccctcgatacacacagtattacgtacatgacacccacatggatgtagtgacgtcgtcagggcttgactctcacgtgggcggtagcagctctgcaggcagaaaatttgaagatatctggcgcgtacctcgtcaacattgcattttgatagctaaagacgcattcatttactctctttgtactcatagaccttgtccgcaattgctgtggacaaccgccatcacgtcttccaaaccatctatcttcttccttcgtatcgtcgatcgatccgcagctggtcctgcatttggcgcgttccattcttgttcccgcttccgcctttcaacttccccccacctcccacttctcttctgtcgcttctactcaagcaagaagaaaaaatccaataagatgcctcccaagaagcagcaagtccaggaaaaggtccttttgggccgtccaggaaacaacttgaagagcggtatcgtatgtgagctaggcccccacccattcttttttttttttcctttttccacacagcacagtccacttttacttccgaaaaactatttaaacccccttgtcccccttccctcccgccttttttttttcttttcctcaaccatgattgactaacaatatggcttcaggttggtcttgccaatgtcggcaagtcgacactcttccaatccatcaccaagtcctccctcggtaacccggccaattttccctatgccaccattgaccccgaggaggctcgtgtcatcgttcccgatgagcggttcgactggctctgccagcactacaagcccaagtcgcaggttcctgccaatttgactgtgtacgatattgccggtctcactcgcggtgcctcgactggagccggtctgggtaactctttcctgtcacacatccgcgctgtcgatgccatcttccaggtagttcgctgcttcgatgatgccgagattattcacgtcgagggtgacgtcgatccttgccgtgatctgaccatcatcaacgaggagctccgcatcaaggatatcgagtttgttgagaaggctcttgatcttcttggcaaacagactcgtcgtggtggacagtctctggagatgaagaagctcaaggaggaggaggctaccactgccaagatccttcaattcctgaaggatggcaatgatatccgcaagggtgactggacccccaaagaggtatgttggaatttttttcttcttcttttcccaaatcaacttgccctttcaactcctttcctgatgaataagagcactgctcgaaattaacccagctcgttgagtgccctcattaaaaggatactcacaatccgagggcaccttgagaaaaaaagttatatgctgaaattttggagtccacttctacatgattgaatcactcatactctttgtgaatcctcatgctaaccgaattggttataggtcgaagttatcaaccctctgttcctcctcactgctaagcctgttgtgtacctggtcaacctgagcgagagagattacatccgccagaagaacaagtacctccccaaggtcttcgagtggatcaaaaccaactctaccggcgacccaatccttcctgtctcggctcagttcgaggagcgtctgaccctgatgcacgatgatgcggccgctgaggctgagtgcaagactctgggcaccaagtccggtctgcccaagatcatcaccaccatgcgccagtccatgaacttaggcagcttcttcaccactggtgaggacgaggttcggcaatggaccatccgcaagggcatcaaggctcccgctgcggctggtgtcattcacacggacttcgagaagaccttcatccaggctattgtgtacaactacgcttctctccgtgagtacggtgatgagaatgcgatcaaggctgctggtaagattatgactaagggtaaggattacgtcgtcgaagacggcgatatcctgctcatcaaggctggtgctgctaagcactaggtgcacatagacaatagttcttcaaatgaaacaccagtgttgagtcttggcattttttccaactgtaaatttccttgctgttgcaaatcatcattggtaggtcaatgttgcagaatatacctcatttcccttctgtatgattcttgccttggtatttgaaggctaagcctacaatagctcacattcatagtgaaagatcatacattctattgtaagctgttcagcatgaagtcgaagcaaaaaatccgaagcacttaatttggtcacgtgaccgcctccccgcgcatcccacttcggtatcaagagcttgattcttatattatcaccacctcaacaagcatcatgtttaagaaagagtgagtcaaacgcttctcataaacccacgactagcccagtggattgtttggtgcctcttgtctacccaatgggagcacatatctctctctgtttgaagaccgggaaagactgcaggagctgtccaatgctccattcaagaccacacagcgcccatgggataaatcttgttcaaaaagattatcaaaaacaccagctaacatccgtgctccatctagtattcccccaagcaaccgatctaaggtgaagtcctcggtgcagcgcggcctgcgccagaagctgctggaaacatacccaggcctcgagcccttcattgaagatgtcatgcccaagaaggcctcattggaagccgtgaaactgtaaagttcccattcccgcgtcttttgtcttccgattccagcaacgtcatctctggctttcgacatgaacgtgctgcatcttttctagagacccaaaagctaaccacaaccaccgccatagacccgatcgcgtgaccctctacacgatagactcaacccccctcttcttccaacctatcgatggacccccagtcccacacctccgcctcatccacgcctacccctccgccatcccgacaatccagatcgaccgcggtgccatccgcttcgtgctttccggcgcaacgctcatggctccaggtctcacatcccccggaggccgtctacctgatgccgagcatgcgcttgaggccggacagatcgttggtgtcaaggctgaagggaaggaggagatttgtatggttggtatgctgaaggttggcactgaggagatcaagagtaaagggaagggagttgttattgatgagggccattatcttggcgatggactttggagaatgcatttagattaagggacatggttttcaaaagaagcaagggattcattgggctggggttgtggtcttttgggatgtttggcttggaactatacctttatacctctatacctctctgcacgcatggcgatgattatgtgttggatgatttgaaatgaaatatccccctggacaaggatccagattggttcaatggatgtattgattgaatgtagatagcttcttgtattgtcttaaaaggctttgtaatttatgtaggagaagcacaggtacatgattactggggtattcggaggttcttaggttgaaatatatattttgacgatggggctggttcgcagaaacttcccatttcccccttttcatcaatgtcttttgatccagtcgacacttatttcacaatgcattccaacagtggaaaatgccgattggagttcgctcatggtatgtggcatagctaatgccacaaagccgcaattcaagcagcccaacgacaatatgagattgaatcactggcaacacgactgacccatggctgatattgagcagaatgggcgacaaacgacgtctggaatcacgggtgcaattatctagaccagaaactgtctagtgaaggggatatgtcgaatgtcaacgaggatgtgatgtccgaatccgcgagcgagaccttggtgaaatccgagggcgacacatctggaaacggttccttcactggccagacctcccaggacgagctgactgaggacaaattgccccgaaagaagaaaagctcagtcaacaaagtctcgacacagcttgtgctagccatatatgtaagggagacgactgcaagcaacgcatctgaggatgaaattgaaacggcaaaacataccggccttaaatccaaatcacgtcgccggaagattgaaaaaccagagaaggagcaaaaagaacacaagaagcagatgaagcagaagaaagccgaaagcaagcagtacgaggaggagaagagtaccccagcgaggaagatgggaactagagaagaggaacctgaagaacgacagttcgaagagcacgaatccaaggagaaagccgaagagatgaagcttgcaaagaagcagaagaagcacagaaaactcgaggcgaagctgagggaagaatcatgccgaaaagattctgcggccctatcaagtcggaagcggaaggccgacaatgaagatgaagttaccacgacttcaactacggcaacagaagaaacagcataggacttggaggagtgatcagataggggccgagatatgctcaaggatgaagcatgtaattcattcacacagttcacacagtctaaatagggaaactggtcatgctccgtggagaataatgagcctcgatgctacgagtgcctctggtcgagctcaacggttacagttacacaaccggcgtctatgttgctttctttcctagacgataattgactcaaacttccaggataatctcccccgaatgtctctggctgtgaaaacaaatctcctcgggtctagtgatgccctcgagcagtgatgatgtattggacgaagagagtcgtataaaaggaccagagaaacaaaacccacatggatcacaaaagctgtcctcggtgatattccgaaggccatagctgattggtacatggatgttgggtgttctcgaggctcaaaatccgttagagggaatgtaatttgaatctcaaatgccccgaacacgtatagtgtgggagtgaagaagtagaaattttatctccagggctggaatatcaaataacgacaacaagcagagagctgggaaggctcgtggattatgattattataaatgaagtgaatatagccaaaaaaaaaaaaaaaaaatcaagctcatgcatgcatcaaccgattacatacctagtctacatcaatagatgaaacctcgaaaggccgaccaaccacctgcaaaaaagaaaaaaaaagaagaatcccatccattcattaccattcctccatgaataacccaattctcgaaacatagttctcaattctccagaccttgaagctgaagtcataccgagcgtcggcacataccaaagcccggcacataccaaagcccggcacataccaaagcccggcacataccaaagcccggcacatcagccgatcttcaagtggcaatttacaggagagcgaggacaccagccagaagaccagcggcggtagcgggggcaaccagacccatagcggcaccgctggaggcagagggagaggcagagctggtagaagtgccggtggtggtggaagtgctggtggtcagaccggtggtggtgccggtggtggtttcggtagtagagctgccggtcgaggtgccggtggtggtgccagtagtagttccggtagaaattccggtagaagttccggtagctgtacgtacagaggtatcagtgctgtgcttgccaggggtggggggactagtagtaagggagccagaggtaagggttccggtgggggagggtttgatgatagacacgtccagggtggaagtaccagtagtggaagcctcggtttcagtggtggaggcaccagtggaagtggaagtagaggcagtagatgtagaagcagtggaagtggtaccagtggagacaacagaggtagaggcagtagaagaggaggagacagtggaagatgtaccggtagtagtagagctggaggagctctcggcggtcacattgaactgctcggactgagcgaggatgccggtgttcttggcctcagtggagagcaggttgatctggaaaccggaactgcagtgtacattaagtgttagtagacatacaatcgacgcgccacaaaggcgatcttacccattgctgacgtccttcagaccactggcagtgtaagagcccttggaggtgtcgatgccagaggcaatcttctcatcgacgggggggtagacggcattgttgacaaggacgatgtcaacagtggaggcgtcggtgctgtaattggttagttttggctgtcatggctagtgtaagatgtgagtgatcatagtcgacatacttgacggatgtccatttcacggtgaaagatttggacagatcgaggtcgtcgcccttggagggctcggtgacctggatagctagactgattattagagagagtctcgcgtcatatggtgatttacatacctccaacggaaagggccaaaggcaggagagacagaatggtggagaaacgcatcttgacttattaaagcgaatgtagtggattaaaaaaacgaatgaacgttggagtgtaaaagagcgagagagatgcgagagagaagttggaagatggaaaaatattcagattcaagggtccatgtcattaagtaggtgaccaaacatttcatttgatattgcacacaaccttggatgccctgaaccgtcaacaatgtctctggcacccactaccaatacggaaagatacctgaaaatagaactgacatggcgaggtacccggttttagagcatcccaaaaatattttaaacattttattatacacaacgtgggaattcagggtctcagtaaggttccatgtggaagtaagtagagcttcatggctcgccgaggagctagtttcaggcgcaaattccactttcgattttggggaatctgactccgtgttccgtactctattattcgatgggagttccatattataattgtgtatacttcgtatattgtatgtactccgtcgttattttttacacccggaggtggcccgtccactatggatcccagccatcggtgtggtccgccgatagggtcgataagaggacgctagacaggcttggcaatccgctagtggtatttggtacagtcttggcacagaaccgaacccgagcagtatgaaacggcgaattacgtatgtatggtatccgtatttttgaattgcaaattctgcggtaaattacagaaaggcaatctggaccctgaattttcatgtatcttttcactagctcgagcaagggtgttggccaccaatttgagggaagatcagcaaagcctaatcatccatggggtaaggggaatcaaaaggctgcccatgagtactcataaattcatatccaatatttactccgtacgatgtctcagaatgaactcgaaaatgctgcgaacacaccgtttcgatgtctcaacgaagacccactccacagaccaatttcaggattgagacatatctgaatttgggtctcggacgacacgctaaatgaaccataagtgggagcactggaggcgataaaatgagtgtctcagaacctgcaggcacgttattatctctttacggacagaatggtgccatttcccagtcaggtagcggtcaaatacggagtcagatccgaatcagtaaattcctttttctgagttatgatttgtcgaatacggaaggaagatacggagtacggagtgcagttcccaagtgttatcccaaatattagatgttgtacataattttcgcaccggagaatccccggggatgcgccttgcgcccaacaaaagattaggtatcgtagatatccacgttactggtagtacggagttagtaatcaagccacaatcagtgctctgtacggtgtactcggctgggaaagtatacatacaagtccctcttgagaccatcccggtccatggtagccgaatcgacccagacgctagcactcatcgcctggacaccgaagtctccataccccttcttgttgataatgacaggtttcatgctaggatgcaacaggtcggtccattgctcatatgcatgttgctgaccgacaaacatgcgctgcacacctggaccagcgttgctgataacacatgcgagtccggataggtgacgggcgtttccgtagcgaacgaatcctgtttcgcagtcagatctgctagtgtggatacgtgttccccatagtggggcgcagtaatccaggggtgaaagggccaagcgaacctatgcagttgggttggttgaaataatcctgctgttcgccgtaggcatagagtttccgggcttgagttaggacgggaagatgaccgttgcaacttggtgtcattgggctatccacattcgcccgtatcccgtacaggtcaccatagaatacgcatgggtgaccgtctttgcggaggaggaccagtgcgtatgctagtaatttaaaggagtgcgccactggggtctgggctttgattagccgtgctcgggccttataaaactgggaagaagttgactcacctccagcatttgtcctggttgctgctgagagttaggtaaagaagtaaatatgccaagatcagacacagttggtacttaccgtatcgtgattcgaaacaagggtctggggaagttagctttgtatcattactcgagcgtcgaggaactcaccacagcgtggtccggccgacactgtaccaatgtatctttgaaaatcccgcgaagatctggtgccttggcatgggacaacttggagaaccgctccaggagaggtacatcatatgcagcgagatcatactctaccttctcgaggtaatgcagaagggacggtaaatgtccagtccagtactctccgatggcgaaaaagtccgggttggcggttttccgaacatattgcacgaatgcgcgttggaactcggttgagaaatgcttagcggcatcaagtcgcattccattgaggcttagggatttggtgatccacgttccccattgcaggaggtctgcgcggacttctgggtgtgtcaggtccaaatcggcgaacatcaggtaatcgtagtttccattctccgtggacacatcttgcgcccagtccttgttggatgcgacaatcttgtagattgcgttttgcttgctcttatcgtcccagtcaacgccgctgaaatgttgccagtgatacttcattgagctgtacatgtcaccgcgaccggcgaaatcaaagcctgtccagccatggacttctgtcggcttagatatatccagatctcttcctgttgttttattttaatcagcgaaaatccatgattgaatatcaacgaagagaaggataaaatcgctcacgtttaggatctaccttgacagcctgaaaaggctctggatagtccgcgccagctttatgattgagcacagcatcccagattacaccaatgcccaagttctgcgcttggcacatcaggtcttcaagttcacgcttggtgccccatttcgtgggaactgcgcccttctgatcgaactcccctaggtcgtacagatcatagatgtcatagccattaccattcacatccattcccttgcatccgggagggatccaaatctgatcaacgccgatggctttgtactctggtaaggcattctgcagacgacgccagtgctgccggtcggcgggaacatgccattcaaaggcttgcagtataagcgaattatctggagcattccatgatgggagctgttgtagattcgctgctgcttctgtaccgtgtatgcaggttagagcttcgaactgttttccggtcggggatactgaccttcaatctgtttccatttctggcctttctgtcgagatccacaccacaggaaagacggcattgcgggataccaaatggcaagtcaagcagtcaagctatgtcaatgtccagctaaatagtagttaactagaatatgcatatcctcccttttagggcttggatgtggggcgactatatttgacttcgaactgttgtaaggtacaggttttgcagttggaggtgtctccatttattattctcaaattattaaaaatgtctcagacgaaaatttcacccaaaggaaaattggaacttttctagaagaaaactccacctgagataatctcattggctaccgccggccataaatgcgtgacatgtaagataatagtaaataggaaaaaaagcccataatcatataaaggccaaagggcgtgtcaggagggaaaagaccaaaaatatcgccaaataaaacaagaggtcaaaaatatggcacaagaaaggatatctccgcgaaccaagctgagtcgtggctcaatggggggaaaaagggtaaaaatagaaaatgaagaccggaagatcggaagaagaatgaagcgaatgaagagagaaggaaaaaagaagggctgtcgaggaatttcaaacgagcatgacgaacatgctggtcatcacggctagcagtaaggcggctacaccggtaccactggtaaattgcattccagccgacgtcgaactactgccagtctccaacatcgcgagggtaacgttcgtctcggagtagccacaaagaccaataccctccatatattgcgtggggaagaaaacccgtggctctcccttgttcatatcgacacgcagcaggccctggttgtcgacagtatagttcttacagttcagaacatccatgatcaccgtgccagcattgtaagtaactgccatgtcgaggttgtaagccccactggtcgagggttgagtggacaacaccatgactacttgtcgaccctggacaccctttgtgaaaccgagctcactggctccctggtagatcgtgtgggtcgagtcctcaaagtagtttgtgcccagtaaggctgcgtggttccgaatgcgattcagtttcgcgatcagctggtagagcaccgcattggtgtcgtatttggtgagccagatggcttctcggttgacaggcaccgagttccccttcaggtgttgctcttgaccttgatatatcatcgggattccatcaaatagcatggtaaacactaagacatttttggccatctgccaagtactatcattaacaaaagcgaccagtcaacccgaggagggcacacataccgctatgtcatcggagtagctaccaattcgaggtttgtcgtgattttcggaaaaagtggccatagcattgacatctggcatggtgattctcatgttctccactgctttcgccaattgagacgtattgccctgggtaaacgcatctatgatttcgaaatagatcggataatttggcaaactgtcgatgtagttgctctgataatcttccatgatgctgactgccccttcaagaacttcacctgtcatgaaagtgtcgacaccattggaaaaattttgtaggaaacccgtattaacgtgcttggcagcgtcaatgcggagtccgtcaatggaataggtcttgatggcgttgtttgcccatgcgatcagaagctgttggacatctgcatgctcggtgaaaaggtctggcagcggcacgtctagatcacctgtctgacacctttgcgcgtcggtcatgttctcccagtttttgattttgcagtagggatggaaatagtctgcgttattgaagggtgtaaatactgagtagtcgatatgtgtggccgggttgctgccatttgtgatgtacgccatgttgttgattaccgtatccatcatgaagtacatgccccgggagtggagagcagcactgaggtcgagcaagtcttgatgcgtcccaaaatgagagttgagggtgttgaagttcaatggccagtacccatggtaggcttcgccataggagacttggccatggatattctcgatgatgggagatatcatcacagcgtcaaatcccatcccttggatgtagtccagacgatcaatggttcctcgccatgttcctccgcaataaaagcccgcggtggtattgcatggtgctgttaatgatccatctgtgcgagcgaaacgatccgtcatggtctgatatatcgatctgggcttccagtcgactgtccttgcggctgatgccgaggaaatgaggcccgtgatcaagagccctaccagacggccaagggtcgatcgtgacatcatggcagctcgtatttgtgtgatgggtcgaccggaagaggcgaaaaagagagtactgggctttcagataaagagtgtcttgattaactcacgagagggcaaagatggccggcaagtggaataaatgagtgacatttggactttatccaggaacaggaaacgaaaggaggcaaagaaagcagaagttggtccctagacaggaaaagatcggggaaaatggctagtcaggtggcacggcttttcaaggttctgttgtccatccatacatgtcttggaaccttccccccacaaccacgcgttatattattatccggccagttgcctcgggatatctgcaccaatggacctgattgccatgcgacctacccgttgatatgccccgggattcagaaataaaggtatgattctagtggcttactttaagaaggactaactacacatcaagcgggggctgcagaaatcaattttagtttcattatggtgtaattgtgggaggggaagaagcgaaagcgacttagcacactagtaacgacactattggaacaaggagtacagagtacaggagctgtcaggtaccaggcaccttgctggaggttactgttgattggtcgttatcacgtggagacactgccctaatctcaggaacggtcatcaccctatctatcacaagagaagtgacgaacttttgacggtccaatcatccgagacaaagtgccatcaatctaagagactagcgacgttactttgaatttccacaaatcgggtccaagctatagatagtactttggtacttcgtaccgtaccgtatagattacagcgtatatacgccgtatggagtaccccgtaccttgaattgatacaccaaacgctttggccttggccctgggcagttgaatacgagatatggcgatacaaaagtttgaatgaacaccttggcaaaattttacgattctatacgaattttaacttgcaccagacacccagatactacaatgaatatatacctcgaacaacgcaagaaagaaaaaagggataaagatgtgggaaatgaacagagataggtgtaatccggtgtgatagataagtgaactcgggtggctgtacgagatttgctgcgccattctcggcttcccggacttccgtctggagtggcgttgataccagtatcacatcacggtaaatactccgtactgcagggatgtctgaccttgtggagattaagtcagatatttcttttgcttgttttcttgtacggagaatacttccaagttttgacttaaataagatgcatagtggacatgttagttcttggttcctggtttcatggaagttatccgtcttggcattattccttgtttaccattggttgctattgtaaaccttggaggaatatttagatttgtaccatggttgagcccccgggaaaccgaaaagaagaagaaaaaaacccttgagaaaggggaaggacgaaaaaaacgaaaaagacggagaaaacgaaaaacgaaaaacaagtgccgtacaccatctggtataagcccccggtcgtaaaagcaccaagtgggggtgggtcttacctcaacgaccaatcggccgggtcgggctatcatgatctcggccccctaacccacgcgggtcatgaccgagaggtatatcggcattttgataggctgataattgcgggcctagaaaatcagcagtcggcagacgtgaaagttgcccactacctagccccgtcaggctccaattaatactcttttaaccgaactaggtgtcctattcggcttttgatgccaaggacaggcgggaaagaagaataaaacaatcataatttatatccaaaggagaaaaagatttaaaattacaattacaattacatctaattaaaccgaaaaaggcaaaagaaataaaaattaccgaagctgagacgttggaacccaatatactccaatacagtctggggctctaaaattgatatggagtttgtctcatctgcttttatttttatcttgagcttcattgcgactaggcttttagcttagcatttagcactgcgcactgctgttatgtgatcatttctttttcacttccacaatcgattcttccttcgtttacatccctcatctctcgtccatcgtccatcgtccctcgttcgctcgttctccttccctcgttccttcgttcgctcgtttgctagtccgcctgtcgttatcttctttggcttactgccacctttgacgccttctgttgggaatttgtgacgtgacctttgagatacatacctacatcccactgctctatggcaattgagagctgcacatcttcatctctttcatagagtgtctcatcctctcatcccagcggggatatccgcactatctgaggcgcgcgaccatcactcaacagcttcgcgcagtcaccagtcatgaagtggctactcaccagcggattggtctcgcttcttgcgaaaaccgtcacagcttggccatacgacgaggcctacctagattataacctcaatgagaataagacggccaccaacccagcagattactggggaacatggcctggccatgaggggaaatatcacccctctccaacaaattggcgcttcccgttctactctctcttcttggatcgcttcgtgaatggtgatcctaccaatgacaacgcaaacggtaccacgtttgagcatgatattgaacaacgcatccgccatggtggcgatgtggctggcctcgtcgaaacattggattatctccaaggaatggggatcaaggtttgtctcatctgtgatcttctagtggcaagaaaatatatgctcacaatgttcagggtctctatattgccggaacctccttgctgaatcagccgtggacttcagacggatatggagttttggatacaacgattctcgacgcgcattatggaactatccagacttggagagacgccatcaccgaaatacacaagcgcgggatgtatgtcttgttcgacaatactattgcgacgtaagttgtccccgtgtgcataaacaagagaccagtgctaactgaatatatccagaatgggtgacttgattggatttgaaggccatctaaacacatctactccattctcggagaaggaatatagaacacaatggaagactgaacgccaatacagagacttcaccattggagctggcgactacaatcagacctgtgactaccctcgattctggttcgaagatggataccccgtgaacgaatcagagacctcaggcttggttggatgttacaacagcgacttcgatcagtacggcgatattgaggctttcggtgtgtggcctgattggaagcgacaactggccaagttcgcctccgtccaggatcgtctccgcgagtggaacccgactgtgcgcgaaaggttgatccggcactcctgcatgatcattcaatctttagatattgatggtttccgttatgacaagggcacacaagctaccgtggatgctcttggagacatgtccgctgcctaccgagaatgtgcgcgcgcagttggaaaagagaacttctttatcactggcgaaatcacaggtggaaacgactttggtgccatttacctcggaaggggtaggcagcgtaaccagtggcctgagagctctgccgaaacaataaagttgacaaatgagtcctctgcccagtggttcttacgcgaagcgggacatgaagccatcgatagtgcagccttccactatacgacatatcgtgccctgactcgattccttggcatggatgggcagctttcagccggttatgatgcgcccgatgactgggttttgggctgggactggatggtgcaatcaaatgatttggtcaatgctaacaccggcaagttcgaccctcgacacatgtttggtgtgacgaatcaagacgtcttccgttggccatcgattgccaatggtacacatcggcagttgctcggttctttcgtgactacattgatgctccccggaatcccacttcttctttggggcgaagagcagaacttctatatcttagatgccactgcggagaattacatctatgggcgacaggcaatgtcgcctgcaaccgcgtggagaactcatggctgctttaacctgcagtcctcgcagtactacaagtggcctgttctggcagctaaaaagggctgtgaggatgtgacagttgcctacgaccaccgcgacccttcccaccctcttcgaaatatcatgaagcagatgtatcacttgcgtgaacagtacccaattctcaatgacgggttttacattgggaatttgtcaaagaaaaccgactacgtttactaccctggttccaatggaacggccacggagaccggaatgtggtccatttaccgggatatcaataccaatgcgcaaaaatacgaatccaaatatcaaccggtctggcttgtttaccaaaacctcaatgacacaaggacatacacattcgactgcaactccgacaatgtgactaagacactgactgctccattcgattctggtaccactgtcaagaaccttttctacccgtacgacgagatcaaactggtggatggagtgcgcaaactcggcttgaatgggtccacggagttgaatggctgtgcggaaagcttgaaaatgaaggcatacgagttccgtgcatacgttcctatcgctaaacatcaataccctcggcccatgatcaccaaattcacccccggccatgatttcccactgcgttctactgtggcgcccaaccttccagagaatgtgacggttgagctttacttctcggaagaaatgaactgtacctcggtgaccggggcaattaccatcgattcatctacagagactgggaaggttccaaccctagattccgatactgtgaagtgcacaactatctctcccttgctccaaacaaattggactgctgagatcccaagcgtttggaagtggacagcaaacctcactggagtgtacaacggaatccataaattgactgtcaccaatgttaccaacaaagacacaagctcttatacctacgctgttgaccacttcctcttccgtgtcggccagttcgataaccctatggtgttcacttccgccaactactcgagcagtctactccacaagaaggacaacggcgacctctttatccagcatcatgctgctggtgcagacaaataccgttattcaactaattgggcatcgtcattctccaactggaaagaatataaaggcggaaatgataccatcgagaggctcccatggtcaggaaccaagaaacaagaatgggacggtgagcatgtgcgtgttgagtactggagtcgtttgactggaagtagcgactacgtgcagcaaggtgacgctgactgggaccacccagtcacacgacgtttcccccatgccttcttcaatggaccctacaaccagtatggattcgacgggggccttgacaacagaatcacactcgacaccaaaaccggagtctggtcctaccatttcacgtccgaatggcctgcagtcggtcagctaaatatctggggaattaacccagacggaaagcccgatcaaacctgggttttgggtgatatcgacaatgacacagtcctagaccgaagcccaccgtctgctctgagcgcgactttgatcaatatcaccgccgcgccagcgaaaggctacctctctcacaaaatctacttcgacgatggaactctccatttctggctcgatccggttggacctcagtccacacagattgccatgttcgtgttattctggatcataccattcctcactgccgtgggatgtgtgtacatcttcatgaagtctttctataaggtcaaattcaaccaggtcggtgtgagtgagaagcaaaacattccgctcgcaatttggaacaagatcaagacgtccagtggtcacagggatcaatcctcaaacccactaatgcgcttagccaacaaatccggcttcatgcaaagcaccaccgctctgggcggagctcttgcttctggcaagcgacgcatggttctaatcgccaccatggagtacgacattgaggattgggccatcaaaatcaaaatcggtggtcttggtgttatggctcaactaatgggtaagaccctaggtcaccaagatctcatctgggtcgttccttgcgttggaggtgtcgactaccctgtggaccaagaggcagagcctatggaagttaccattctcggcagcccctaccaggtccaagtccaataccacgtcttgaataacatcacctacgtcctgcttgatgctccagtgttccgtcaacagtcaaagtccgaaccctaccctgctcgtatggatgatcttgacagtgcagtgtactattcagcatggaaccagtgtatcgcggaagccatcaagcgattcccgattgatacctaccatattaacgactaccacggttctctcgcacctctttacttgctcccaagaactatccctgtttgtctctccttgcacaatgctgagttccagggtctctggcctatgcgaactctcaaggaaagagaggaggtttgctcggtctttaaccttaacgaagaggtcgctcgtcgttacgtgcaatttggtgaagtgttcaacttactccacgctggcgcaagctatcttcgtgttcaccagtcaggatttggtgccgtcggtgtttctaagaagtatggtaaacggtcctatgctcgctatcctatcttctgggggttgcataagatcggcaatctgcctaaccctgatccatctgacgtcggtgagtggacaaaagagccaaccaaagagcaagatatcaccgttgatgcaacatacgaggctggccgtggtgagctcaagaggcaggcccaggaatgggcaggactcgatcagaatcctgatgccgatctacttgtctttgttggtcgctggtctatgcaaaaaggtgttgatctcattgcggacgcaatgcccgctgttatcgaagcccggcctaacgtgcagctgatctgtattggccccgttatcgatctctacggtaaattcgctgctcttaagcttgaccacatgatgaaagtctatcccggacgagtcttctcaaagcctgaattcactgcacttccgccattcatcttctctggggctgagttcgccttgatcccatctcgtgacgagcccttcggtctggttgccgtcgagtttggccgaaaaggtgcattgggtatcggagctcgtgtcggtggtcttggccaaatgccaggctggtggtacaatgtggaatcaatctcaacgtcacatcttcttatgcaattcaagcttgcaattgaggctgccctcaattccaagacatccgtccgtgcaatgatgcgtgcgagatctgcaaaacagcgtttccctgttgctcaatgggttgaagatcttgagatcctgcaatctactgctatcgcggtccacaacaaagtggcgaagggtaataacaacaacaatcgacctggcacttcttctggagtcagcactttcagtggagccctgtcaccttcaccttctatgactcaactcggaagcccacttgcttcacccggcctgaactctccatacacgcattctagggacagcagctattccttcaaccaaatgaacaaccttgcccctcaaaagaaggtcagctacagcgcagatacaaacctggacgacatggagaaaccaaagtcgggactgagccgttctctttccctgggtgttcactcaggtcctggtcatgctggacgtcgcagagcagcaaaagaggctggtatctcagaaagcgatgaaaacggagccactgatgccgaaggcgaggatagcagcgacgaagacactgcccgcaccgtgtttggcgatgacgaatacactctcactccggctcaagtcgaggcagggcgacgagcccaggctgctcaaagagaccgtcctcaaaacctgccttctccaagccaggagtctttacatcccaggttcatgcttcctttggaaagcccgggatctccgggcacaccaccgagcgcggacagcctccttcttcctccccagccatttggccagtccaatcgtttcagcagcgcatccgttctctctctggactctgttgtcggcaacaagacagacttcaagctacagaaggttgatcctttcttcacagatagcactggcgagtactacaggacgtttgataaaaagttggatgccctgaacggatctaactccgagtcgcaactttgtatcgaagagttcttggtcaagagcgagcaacagtggttcgacaggttccgcaatgccagactgggtcgtaccaaatctcccacaccatcgattcgacactcatcaaggaacactgataccccagacaatatgttctacagtgacgatctcgtctccaacattaatagcaacgaagaaaatcatctccaggatgatgagttccttctcggaaaggactatgtccctcccagtggacttaagaaatggatgcagatcaaaattggagactggccggtctactccattttcctcgctctaggccagatcatcgccgcaaactcataccaaatcactctactcaccggtgaagttggccagaccgcggataagttgtatggaattgcaacgacatatgccattgcatccatgtgctggtggctcgtgtaccgctacttcaagtctgtcgtttgtctttctactccgtggttcctatatgcttttgcattcctcctgattggatctgctcactggcaagatgattccttcagtcggggatggatccagaatgtcggtaccggtttctacgccgcggcctccgctagtggatctatcttcttcgcttcaaactttggtgatgagggaggtgctccagttgaaacctggattttccgcgcctgtgtcattcaaggtattcagcaggcatacgttattgccctctggtactggggttcgacaatgaccaaggcttcttcagagggtctcttgagcgctgagtcaggcattgccaatagctggaaaatgaggtgaatagccccgtacactgatctccttccttactttactaacattactccagtgcgatttgttatcctatcactgtcttcctgtgtttcgtaggcattctgttggctttgggacttcccaactactaccgacagaagcctggcaaggtgccgtccttctacaagtcccttttccggagaaagatcgtcgcttggaacttcgtcgcggtcatcctgcagaacttcttcctgagcgcaccatacggtcgaaactggagttgtaagttcaatcttcccaatcgaactctggcataccgatcagtactaacattcctctctcccagtcctatggggttcctcgcacgcccacgcatggcagatcgtcatcctctgcatcgtcttcttcggcgttatctggtgtatattcctcttcgtcgttagcaaattctccaaacgacacagttggttccttcccgttttcgcctgcggcctgggcgcaccccgcttcatccaaatctggtgggccatctcgggcatcgggtactatctcccctgggctgggagttatacttccggcgcgctggtctctcgcagtctctggctatggctcggcgtgttggattctatccaaggtcttggattcggtatcatcctcctacagactctcactcgagtccacatgtgtttcgctctcattgcatctcaggtgctgggttccattgcgactatctgcgcccgagctttcggaccgaacagcgtaggccccggtccaatttctcctgacatgactaagggcgcccattccttggctaatggctggttttgggttgctttgttctgtcagttgttgatctggtatgttgctccttgcttgtctcgttcagcggaattatttctaacatttatctgcagtgctgggttcttgctgttcttccgcaaggaacaactcgccaaaccataagctcccttcatttttttggagcatttctgtttcttgtcatacaccggctacgcccatcacgatgaacatgaatgatcaaattaatctcttctgcataattgaagcatgttgtccccttgtgatctattttctttttctttttagatatcttaatgttaatattattgtactgagttcatactcagttagaatacatcaagtcctcgtagtgaaatgacgtaaagtcgtatataggtgtctaacaatgctgctttttctttatcctagtcaatgacatgaattctctcaaagagcacaagaccatccaaggctcaaattgctcgactgaatcagtccttgttttattgggcttccctaattaatggggtagtttgatgaagcttcagattcgtctttatacagttcaatttggaaataagcaacgtagtctctatactatttcgtgagcacaatgctgtcttctcctgacttacaggctcaacccccctttccaaagtccgagaaagctcttccaatgagcattattgttagccgatccctgccatactggaccatgagagttgtcgacccgagatgtcagttccatcaccaatcagcggtatacttacccgacctcacattccccactaagaccagactcgcatcttgactcttagacgcagctcaatggaattagtggatagttccgggccaatcaactccaaccccagatccggggtcagagaacagtgcggggttgagggctgttcagctcccgtgaccagtcctgatattggtattaatatcgtagaccatgtaggagactgagcccatttcattcaaaacctatcctggaattaataagcttgttgatccgaacgcattgaattcataatgtccaaaactcgagacacagagaaggacattgatggaggttgtatccatttggagtattcagatgatggaattgcacatccaaccaaggaagaatatgcacggtaaaccaacttcccagtttatcggcgaatttgttgctgaaacctccaagagtatataggaaaatcgacaggcggatcctgccgtttgtggcgttgacctatttgttatgctacctcgatcggactaatatcggtgagaaggcgaatgcttccattggaatcgttcaacagtactcttacttatgactatacaaaggaaatgcacgagtcttgaacagtggcaccggcgacgatctgatgacctctattgacatgaacgaccacgaatatcgcattgcccttatgctatttttggtggcttattctctatttgaggcaccaagcaacttagcaatgaagaaattcactcctccggtgtgagacttcgcaccctgacggtcagatgggtatattttttgctttactgacactcatgactagctggctggcatttcttgtcatttgtttcggcgccctgtgtgcaggaattggagggtcaaaaaatgcttcaacactcatggctctccgatttcttttaggtgcatccgaggctggtgtttacccgggaatgatcttttttctcagcttctggtacggaccgcgtgaacgagccatccgaatcgctgtctttctttgcagtgccacgctagcaggtgctttcgggggtatgatcattccgaacgcgatatgtcaatttatggatgctaaaacttgtttttataggtgctattgcctacggagtagctcatatgaatggtgccggaggcttacaagcatggcggtggctttttattatcgaaggtttaccatgtctcgtcctagcagttgccattttctttttcctgccaagctacccggaaaaggccaattggctcactgcggaagataaggccatcctcaaagcatcctttggaaataatgtggctcgagggtacatcacaaatctacccacaacaataactaccgaagctaatctgattctttctacagtgaggacaagctcaactgggctgatgcaaaggcgactctcaaggatcttcgcctctgggttcactatgtcctttatctttttgtcggaataggtgtttcgtccctctcattatttgctccggcaatcgttcagggaattggatacactggactccaggcgcagctcttcaccatcccaccttacgcatgcgcatatgttgtggctctcacagcggcatatatatccgatagagttgtatgccgagggttgattgctgccctgttcgggtttataggatttgttacgtttctcattcccggtgagttgtactcccattctcatactggtcattgatttctgattctcaatatagcctgcgtcccgagcccatcacttcatcttcgttacggtatgcttgtgcttagtgcatgctctgctttcgggtcgctacccccactatgtgcgtgggtttcggacaatgtccacagcactactgcggcatcggtagcaagcgggttgaatattgcatttactggaccaggccaaattataggggtgtggatctaccagagtcagcaggctcctcagtaccagacgggccatgctgtcaatgccgccagtcagttcatggcaatggtgttggcactgggcctatggatctattaccgacgacagaatgcaaagcttgctccgggtgagcagaagtgggttgcataaggtgaaattgagtgactgccagtccaagaggattacgtactgatgtcggaagatgttctactcgacagcagatcactataagagatcattacgctcgaagagcaacatggacatgagcaagtaaacaaaattatatatggagaaaatgaatatcccaaattgtgatcggtagttcagctgttgtgtcagaaaaagagagcggattgtttttctattgggcttgctattctaatgtcgatatatatctcaattgaagaatgtttatttttactacggagtaataaaccaacgaaaaatgtatattcaaatagatcagtggtaaccagtgccattctcaaacgaacaaaaacaaaaaagaagtcagactatcgaagctttaccgtaagaaatcgagcgtttaccttgttgatagttttcgaaagtcaaattcttataagacatcgttctatgtagctatatagacagtgctcgggcaaatttcgcggacatattagattattcatgtgtaaagcgagacaagttttcaatatgcaagttaaacatagttagatatctaaggctatcgaatgagtatcaaacatcaaaattttccagggagtctcattgcaccatcaagtctcagacagcatccattgagcatccggttcctaaatatctccaaaacaaacccgccgaactcttccggtttccccgctcgctttggccattcaaagtggtcctcgatagcctttcgtgctctttccggcatctttccttgagcggtcatcggagtagagaacatgtttggcgcaatagatacagctcggatgccgtatcgggataggtccctcgccaatggcaatgtcagagaccgtatggctcccttggtagccgcgtaagccacctggccttgctgcccatcgtacgctgcagccgaagataccataacaatcacacctctttcggactcatcgtcgggatcgatcgactcgggtagttgagccatgtgaggaacgacttgtcggatgaggtcgagagacccgacaaggttcacgttaatggcttgttgtaacttcgcaagttccagaggctcgaaggaggaattcataatctacatcgctttaacaccggaatcctaaatccgtgtatagaatcttggtccacgcacttttcctggagctaggatgcccgcacaacaaactaccccaccaatcggagctttcgtattctgactccactcaatggcatcactcactcccttggtgatgtctgtagtgcatgatatgtcgaccgggtagaacctcactagctcggatggaagatcttcttctgcggcgtcaataggttcagccaggtcaaacaaagcaacgcgcgcgccactatgagccaaagcctgtgctgtcgcccggcctaagccggaagatctatattcaaagtatgtcagctgggtggtgctgacgggtaaatcttgtgtcctaccccccggtgacaatgaaggtcctattttcaagctgcattttgctcgaatgctctttttgaatgtgtagtaggcctacactagttgcattgaaatccacttttataagtaatttctggtatctactcggggacctctgcctggaataaaatattacgccaagagaggtcgggtgtcgggtaattctttcggaaagtagactttcgccctcgaatggaaaatagagatggggaatgagcttgtagtcgtaatagctaaataatggggaacataaagccgaacaggtcgagggaaatgtatcgcacgtcgacccgagcattctttgctctttgttggtctgttacttcttgtagtaggcgcgcagctttaccagcatgaatgctcgcatgctcgccccctggtccatagtcggatttcaccagactcaattggcgaagcttagcaatacaccaggcaactttgaccgagtcggcgcattcggtcgcaaatgtgaacagagcccacattgctgcgctgttgagaggcgactcatcccaatcatcaatgtcagatacgaagttttcggaaatcacaattggctggtcgacactaccacgaagttctgcccatgtattatcggctgctgatctttcatctccttgtgctaaatggtcccaccatgcagctctgtataaataacaaaaattagaccaaaagcatgcccgaatcacgcagagtaatcgagaaatatctttcgcaagatgtagttgtaatgagtctttgagttgctcgaaatcggagttcaaaattacagggcggctattccaaagctggtgaagatcgttgataatctgactggcgctggcagtgacttccacttcatcttcgatggacccacgaggccgacggtggcgatccaacatagcaattttgcgaaggaactgctgtgacagacgatggaaagtgaaggcatcacgaagaatgctttcctttaatgtcggcagtgggctattggaagggcacgacgtcaacgggtctcgccgccttatctctggtcgtaaccggtcgggcggtggggataaaaggtccatttcccttgaactttgctgcaatggtgaccccgcatccgcgactgggtgcatcgacgggtttggagggccgcttatgaaaggtgatactgaggttggccgacgtgtcaaaatgccgtttcctccgaatatgacaagtttcatatcgcaaagaactagccaattcaatatttgctgtgttaacaaatcggcctcatctagatcttgtataagacaatctgcccattttatttgatgggctcgatgaatatcctccttgtcgatgagctactccatttgggtcagccaatgttcgtcaccgacgacagatgactaacctcgaagcaagtgagaagaaagagtccaattagcagctctcgacgaagagatgcagacggcttcacctttagctgctcgagcccctcgataagcgactctctggcaaatatatacagataatgagagaggttttcgccgtttcgtagagcatgtggacctttgttgtgttctgtagttgagaaaaacttgttaaagtggagctgggagagcgccacgattgcgtttgagatagtagagctgccacgggccatagccagaatctgacaacagagatcgtgccatgaggtagtatccacacttgatacagcaggaacaaacacatgctcttggaagtatcttcccaatgcatcggaacgacgagtgatgctttcatccgctccagggtcggtagttgaacgcgccgcaaagaagatattcgtggccatccggttgaaatttggaactatatctcgcaaaagattggcatctttgctagacgagttggaggtgggggcggattggtgggcattgctttcttgctcctgaagagcctcagttaccgaaggctcggtttctttggggagatggtagcgaacattctctgcggtgtgcttaattttcatattagcggaagagtcagcgatagaatctttaccgggcctcatacaggcacgtcataggttgagtttgtaacgaaaggggcagcgccatcatgacggtcatgctccaatgtgatggcatcctccaacgtcggaattgccaggccttgtggctccggtagcaaggtcgatggggaacaccataaatccagagcattccgagagaaggcgtcaaagtcaaagaacaaagcagtttctgggtaaaaggcagggttgaggctcgagtcaagatccatcaactcgtcaacgtctcggtgattggttgaagtcggtgactgatccacattctgctgactgggatgtgtgccagggctagttggtctctctgtctgccaacgcttcgatggaacccgtcgatacacacattcagctcctagtcgggtacagttggcacataccggagttccttcatcgcatctcaccttgcgcctcttgcaggtggtacagccggctcgtgatcgaggccccgatcgacccaggcgtctttctggtcggaagtcggtagatgcagttgcaggggacatttcagattgggaatgagaaatacccgaaagaatcagtttctcttatatggaagacatgagcattgccgaggtcttcgcccccacgtccttttgatgctcatcagagccaaaacgcggggttaatgagcgtcacctgatctgcagtctgcttacaacaaagacttggtctgcaactagttacagtgttctggcgaaaagaaattatcaaattatctcacaatctaacttcacgtggatttcccagagcttcgaatgtgtcggcagcccaattactaaatgcctttcgagatttcacggcctcgatatcctgcttgtttactccccttgcctccagagctgggttatatccgagacgtcgtcgtccgtcaacctgatcctggatttcagacgacaagggtgcaactttgtcatcggcacgacctaaaacagtgacaactgtagcacccccgaggcccatgttgtgctgcaggcagtatttggtctgcggtacacaacggtttgatgcccagccacgtagatgccatactaaatctacattagcataatcccctatataaatgggttgaattgaaggtacctaactcggccgtttgagcaaggcctgtcgctcccagcggatgacccttggaaatcaatccgccactgggattgatgatccatcctggagacgttcttttcgttttagaactttgatcatacgtgatgcctccaccggcgaccagcttccacccttcgccgtgtggagctaggcccaagtcttcgatcgcacacatctcgtttgtcgtaaagcaatcatgcagctcaatcacttggatatctttgggtgatagtgaagcctgcttgaaggcattctgggcagcacgtcttgtcatattggacccaatcagctcgatggcgctcgcgggctcatacaaatcccgagagtcagttgcaagggcttggcccctaatggcaattgcgcttcccttcaggtagggatgagcttgcaggaaacgctccgacactaggaccgtggcggcagctccggtctatcatattagtacacactggtgtatgcaggcggggtttgataagaatatgtacttaccgaggatggacagcattgtagccgagtaatcgatcccgacacctgtggactcgatgaaacttccttggtcgtcacagactgacgcagctgactgtatggattgttcatgccatgcgtacggttagtggaggcaatagcggcgaaatgctctgcttttgctccgttcgacccgtatttttccaggtactcagcttgggcgttggcatatagctgaggtgtccagccagctgattctgcttgaccttcgggaataaaacgcttcgaaagagccagaattcttcccaggggattctccctatccttataaatctgtggaagagcaccaggatacattttgtcaaatcccaccacaaggacacaatcagcactgccggcctgaataaactgattggccatatacaggcccgtactccctgcgctgcagtagttatgaacattgtaaatgggaactccagtcatccccagggtgtagaaaacacgctgtgcgccagcagagtcaccaaacacataacacccaactccctgatcaacatcatcatagttgattccggcatcgagtaaagctttcacacatgcggatacggcgaggttgaaataatctccctcgggattggaggaggttgcagctgattttttgggagactgaaatggggtcatccccacaccgacgatgtatactggggaggcagtcatattgattgatgtacaggaaaatgagaaggagtgcacaaattatatcgcaatatgtagattagcgagcttctcctagacccttttaaacacgcgaagtgtaccacttaatagttcccgaagaggtttacaaggccgatttacgatagcaacaactaattacttgcctccatgtcggaatgatattggaaccgagcattgtcgtcactatcttcagtcctcgaggatgagggtgctcgggtatcggataaatctcttggcgctccagcattctgctcgggtatagcacccaacagcaatctaactgaaagcctcatgaaagtttccatattcagtcacctcgctctgatatactggcaagaagtgtagtcattcgtagcaagtaagttatagtaggtcgcagtcgtgtaaagaacacagaagacagtattggggcttctataaagacccagtcaccgggagtagtagaacactggaatatgttttatcgattccgtcattttggcttaatgattgcttttcaacggcgtactcggatgaagagaggacgaatatacaccgattctccaccgcgatatgataatgtaagccatggataaagtacatattctagcctaaaaaccctccaattcagttgattcaatatttcaatcgtgtaaaaatgctctcaaatcagccttctattgtctatggcccgtcagctccgatcccggtgtcaatgacatttggggaccttctatcctaccatgcacaacacaggccagataaccatgcgattatatcgcatcatcaaaatatccgcttgacctatagtcagctcgaagagcgtagcacgtcgctagcaaaggcattctccagctataacgttagccggggtgatactgtggccatcatgttgggcagtcgaacggaatacatcgaagtaagtagtactccacgaataaatagcacctgaagtgtactgactatctagacattttttgcgtgtgcgaaattaggtgcatcgcttgtccttcttaatttcgcctttgttttagaggagatcgttgataccttgactccaattggtaagggattatttctcattctactaattgtcgtagctgatgcggttctcaatagccccgaagcttctcgttatgacacccagctttgggaaatttcaatacgagaacattctattaaagctttcaaaaatgcttccttctttgcaagctgtggtccttgtggatccgtacaaactgaaggctcaaagcctaggagataaaatggtctcctatgaagtcttactcaagcaaaattttgccacgagcttgcctggcaatgtttcgcctcatgacattgtcaacatacaattcacatctggcagcactgggactcccaaagcagctgcacttagccactacaacattatgaattgtggcaagaatatcagtgcccagatgagcataagcgataaggaccgagtctgtcttcctgtgcctttgttccacagttttggacttatcattggtaagctgctcatcctctgtgagggttctgataatgctaaaattgcgtgaaggtatttgcaccagcacgtggagtggatcaaccattgtattcccatcggaaacgttcgacgccgatgcggtgttgaaatgcattgagggatatagatgcactggcatttatggagtcaccacaatgttcatcgaggagatgaagaacccgaagtttgcttgcaccgatcgctcatctctgaagttagacttctgtccaataacgctcgtcgaccttttaaaactgactcgtactagatttggaatcatggcaggatcagcaatgccacaggatttgctggaaaaggttgcaacctccttcccagttcctcgcctctacacaaattgggggatgacggaactttcgtccattaccactatgacacaccacagcgatccaacccccaatcgtcttcacacagccggtcgccttttcccgaacttcattgggaaaatcgtggagcctaacacaggccgagttctgccgtggggacagaagggagagattgtgatctctggatatggagtcatgggtggagggtatcttcgaaatccatccaagaccgcagaagcgatgagacaacacgtggaagacttggagccccatggagtcggacctgtggacagcgagggaaatcttagaacgtggatgcacacaggagatgaagggtattttgacaaagatggatattttgtgatcactggacgcatcaaagacatcatcattcgcggaggagagaacatttccccggtagaaatcgaagcacgactttcctcccacggggcgattgtccaggcttctgttgttggggttccgaatgctcgacttggagaagaaatagctgccttcgttgaactaaccaacggccatgctaaacctaccgatgaagagctccagaaatgggtgcgagcaagtctcagtcgcttcaaaacaccaaaacacttttggtggataggtagtccccagcatggcgttccccgagaatggccgaagactgcatctggaaagcttagaaaaccggacttacgggaagtcgcgaaaggtgagttaaatttgtttccctccgattttccctagacaattacactgacggtatcgggtatgacagagttgttggaggaggtgccggaaagagctcgactttagagagtcgggtctaatttttcctgtttctcctcttgagtttttccatgtctaccgtgactcgatcatgcgtcttcaatatcaagagcccagagtgcatgtcacagccactcagccaccaccacgcaaatcttctgtatgaagatccgccccacgggtgtggatcgcgatcgtcaactttaaagcttctttgttgtgccacatcttggcggatttggctgtaggggaataatattcgtaggaaaggcgtcacattaagttgatcgatgagcccgggcaggggggacaggagagatggcctcggctggagaacaagctgttgtgatggcctcaggcccgaagccctccacagttaactaccatctccttgtggtcatacaagcctagcaggacttagcaataaacaaaccaccattgagaatcaaaaataagactgtatccctgtagaaaaattaatattattctattataattaggagaaaagttaaaaaggcaagctgtgagtctgattgccagtcacatcaagtctatataaatcccacaccaagaaacatggtcatccatcatctggaaactctgtcaccagtggtaggtatcggctttgccagccgcagacaccaacacagtgcatattcgagcggaagtagcaagataagaattttgttgaagcggtaggacagggtaaccgtaaaaatcgccaccacagcatcgagccagtagtgatttgcggtagcgacgatgacactgaggaccagaatcgggtacaatatagcgagtgccaaaaagccaaactccgtcatgtaggacttctgcgttggcctgcgctggagcctttgcagaaatccggagtggtgaagaaaggtgcacccgatcacaaaggcataggtaaagtgcaggctgggcatggccgcgaattggttcacggactttccgccaacccagatgctttcggcattgccttggcgcacggtgtcgtagaagccatacgagtctggaaggagtcgtggcggcatgagtgggtagacacagaataccaagaaagcggcgagatttccaagtgtcattgtccgccgtgcggtcgcgaaagacgcatggttcttggcaacataatagtaccaggagaggaatctgttcatttggtcaactgactattcaaattggaactatatcaagtgaagggttactcacagcactgtgccgggaatgtgtattaatgaataaatgcgattaaagatagtcaagatcgacggatgattttgaataaaaaaagattggaaatcggcttcgttgatcggaaatatccaagacgcggttgtatgttcaaagttgagaatgtcgatggcgtggccccgcgcaacctcgacaacacctatctcggcgggagaaagccactgcgccgttgctttcgtcacagaatagaatagatagttcatactccagtagaacatctcaaccaagaaaggtagtttctgcagaattctactgtgaatgtggtgcgcccagcgagaagagtctccggtcttgacattgatcccgcatacagtttctgatttgggttgcagattgtcgatggaataagcatcgccctcctccagaatggcgtagcttcctaggtattgagattcattggaactcttgctagaatccctgcgacgattcacaatcaatgacccaaccataatacccacaacgacctgttcacgacattaatacacctttagcgatatacgcagtatcaaacttacaataggttcaagccatgcgtgtgacgctaattgtggcttacccagatcgggtgtatcctgagtaaaattggtgctgggcaccatacttgcaatggtagaagcttttcagaaatatacaaggtaaagcctccaaagacgctagagaatagaacaaaattgaagcaaatcaagattcaaaaagaggaaaagggagacaagacaggctaaatggatgctgtcgtgtgccctctaaccacgttattccaattatgcataatacagacgatacaataataatatacgagtacgaacttcggacggcggaatgattacgggaccgaatcccgaggcgggacatagcaaggagattatattggtatttgccctcctttaacaggccgagctcgttaacgggaataaatgcgttcatttacagtttgtatttccataatgatctctctatagaacacatttagcagaaactcagtccatttcttggagagaaaaaaaccagaaaataaaagctcttttactgccaatgacaattccaacgccatggcttggatggagtcgtaagggaggcgttcagctagtcccgaatagaacagacaagagtcccgattggcttcttcacattacgtacgtacctaggtatgcctccttgatccaaagcgggaacatatcgacctatcacgacatattatccgctctatccaatgattgtactcgcactcacctgattaccaggatattgtaggtccagctttagatatgagacacggacaaaccactgtccgaagtcgaagccaattattcgtagggagtacatactgtacagaaaggtctggatgcatatctgtaaggctgtaaaccttatcgatcttggaatgtgctttgtttgcattctaactcaaaatccgagcttgaagggaatctgtaattccaatactacactgattatttccatcctggggcagacccggagccatactttggaatgtgtgtttctaacaataacagccacttggaaactcgactgatgagaggaaaggcaatgtaagctgacagagatttatggatacataagatcatgccagttcccatgtggagtaaatcgaactcaaccttggaagttgggactagacgttgtcttgaacctcggcttgattttttatgcaaacgtcatcattgttgaccttgcaaatagccccctaagtttcgaagttctatactaaaaaaaagaagaaaagaaaaacaatgacctgattaatacctgattaataggggttcgtgaaaatatgccctaaagcaaggttagtaacctagggttggtagtttgttgatgtagggttgaaagaagggttgaaaatagggacgactaaatgtggataagtcaagctccccatgggaacctggcgcatctaggctcagatttcctatggactggtccgtagatgtgttaaatcttgccttcaaactgctgatccgcttgtggcttaccgtcctaccaacttatgcagttcatggtcatggattcattcccgaggtcgattccgaggtccggaggagcatccatggatgtcaactccgtagacggtgtgtattcataattaatactccaaattcataattcaactttaatgtggcaaactcgaatttgtgtgcacgtaatcgtctccagcccgacccacgttcacgagatggatccgtttcactatacggagtataaattttcagcttacacaaactacgaatctttgtggcacgcctaactatgcgaaaggtaaatgggcattaagattgtatattttcttcacgctccaactggccaaagcgaaaataaggtatgtaaaatcatttatcagatctaattgagagcaatcgttgctcgtttgtatactcaatcatatggtaagtgaagaaaatccaaaatattacgactatgtaccctttgtatgggtgtggcatataaaagatactcgtgtaagacaacatgcaaataagacaaataaactgcgcttaaccaatccttgtccctctgccacgcgtttctgactccttatcatgtttaaggttttcaatttattgcacaatgccattgtatgaagcaaggctattatataacaattcaataaatgacgattaactacccattttgagatgtagttagacatagtaagaaatatttgcctattataaatcaaaaaagagcaaaaaagggttagaactatcccgtgacgatcaatgttatcaaataagacatttgaacccctatagcaatcaatttcaccctaacaacctctggcgggaacggaagttggtatccccggccgggtacgagtatcccgagtagttttcaacatccggagaaactgacctgtccgtgatattttaccctggatatggggtgttccgatcgaaattgctttgttggagcttgtatctcgaatacattctccttggcacctaggtcgagagagccagtcagaaagggcaagtctagcccctagcatgggatttgcttgggagggctcagccggttcggctcgctagggaaagagattgaagtggagaagagaaaactatgataagctcgcaacctttacctgcgatgttatcatatgcagatcaagttcaatgcgctttggactcagttctccacgtcttctccccgtttccaaattatgccaacaagagacgttgacgaaaaagacgctggctaaaggctgcttggggcctgaggcaataaggctaaccattttctaagaagctgacaaccttgaagataactgcttaggtgtgttttggaatcattgcctacatgtgaacggtctgtggttggaagtatgcaaacttatgctcacagtcggaatgatgtctttccattttcataaccactccaatcctagatatacccatgcaaggtgattctcaaaactgataatacagacagaaacgataactttggctatttaataggcagatataataatcttgacgttgtaggtgctcgatttcactgtctgccgcagatgtgtagttgccgcaaaccctacggagtacatcgcacctgctttatgcaatgatgccaatgttatatacccgacgcaggcaccatgactctctctacaactaactagcctcagtcagcaagtcatacattcgcttccagcccttccatcatgaaaaactgggactacgggaagctcgccattgccactgccgcaattctcggagtcctcacactcggcgcactgatatacttgctgctatggtacgttcgacgaggactgcgcgcccggcggcttcgtcgccaggagaaggagaatgaccagtttgaccagtccgcagtgtccctcgccgaggacacaagcaggaccctagatcacttcctcatgaaggatattcaacctgagcggagttcaatcatcttcagcagaagccgatccccatccatcaacatcgtcattgacgacgcggacgctaatcgctgcaagtcttcccctcagccttatctcccagaacatcacactgcagcttcttcatctgcagttacccacgtcctctcacagatctcgactcaaaaatctggtcctgatgacccacggactcagtggagcagctcgggacagcgttcgtctagtacgacgccgcgggcatccacctcgtcgtccgtcgtcccagcatcgcaatcatcccaggtttggactacgacttctggtagcacaccgtcggagcagactcagagtgtttcagcacagcactcgtcgaccacgacacctcgagcatccatctcctcgtctgtcgtcccaacagcggggtcctctcaggtctggaccacgacctctgccgagactgagacgttttcgctccttagtcaatcctcgaactactcgcaccaccctcaaagccccattggcccatccacctcccgcagctcacagatatatacacgtcgttcgaatgcttctgctgcatcgagccgtccgtccagtgggggtatcttgcagtctgcatcccgtatgttcaatgaagcagaggctgctcggatggcttattcgaggaatatcgactctgttggatcaatgagtcccacttcccccgtctctccggtgttagtggatgtttcagctgataacaagctcccccaatggacctccgtaccgcctaccccctttcctttcagtcagctctgatctttgatgacacccagtgggctttttgaattgatattgcttatttgccgttgattcagacccgacgaggacggattgagatggattcaggttccatgcatgactagggttccattccttctatttgcattcccttcaaaccgttgatgtctttggaagtcaatgttgttaatcaaattttctttactgatacctctgatccattatgtacagcgtccgggtcttttttagggctacaatgtttactttttattcataaagaagtgcagtgatgatgagttagagatgaacctaaaaatatattccattgtgagtagttgaacgtgaaagaatcgagcaaaatatatagaactaacacccaaggcctgggttcatgaattacttgcgttgatttcttttgcgctttttagcgaggacgaggcctttatttttcgtgcgccaatcccagtgggtacttcctcctttcattcggcgtgtcatgagttccagtacagcaatggaggatctgcctctagatagaaacattgctgataccagcgacatcggtaaactcacgatgtctgtccaaaaaagctgctgttttggcatgacggtccgctttcatttccgacgttctaggaacccgccagaactgaacgctcatccccctctcctcccacatttccacctccccgagaagacactcccaaaggtcccggttcctgattggttccccagcacgtgtaacccagctgtactgtatccaatcgtatacctctctcgtgataccgtccactacatattccgagtctgtcgcaatgatcaaacgactaaagccatccatagcccagtctcgatatctcagagctgcaatgacggcgcgaatctgcgcgcggtcgtttgtcagcgtgtgctgttggccagtgggccctttgtactcgagaggaaagcgtgcgtaaccagatgcagactcgttgtagacaaaggaacaacccgctctggcgttcggtctgccgttgtccatacacgtgccgtctgttaagatgaggaattcatcctcgacggatcggttgtcgtgattcagacgaatgaaccggtggactcggtccgttgctgtgactttggggcaatgtgggaacaatgactgcggcgtatcatttggatgcggaggagcgaactctgtggggatgacgcgaccactaccgactctaagctccgtatagagtcgagggagcatgtggggcgcgaagtattgcgcgggattcacttggtggaaggacatggtggtttggtaggccatagcttcaaggtttagcatctgccggtggccttagtatatcaggcacaaaatgtaccttcaaatacagatgaaggtgtcggagttggataatagggagatgacgggaacacgacaaaatggtagcgagcctcgctccttccatacttgtcctggatgcctcaggccgggatgacaaaaatcaataatcattagttatatttcttggtgaactaccaaaaaaataagtaaagggaatctccacgcgcctcgctattccagtactggacacgctgcagaggtaaaaaccgacaaagattaaaagcacatacagaagcaaagttctcgaacacatgtccgccatgagatatacaggaaatgatagctgacacaaaaagaatgtggaagtaagtccttgagatctatccggatatatcatcttcatcttcatgcattcgtatcgcgcacactgcgtaggcaccgttcaagccgtttgccacgctccttttcgcgtacaagagtatccttgacaaacgatcggatggcgtcacggccaaccctttcccgccaggaggtccagccagcgagttcgcccaccacgacatccttgttccacgagatctctttcgccaaccgagtagactcggattcgccctcacgaaccttctgttcgaggtcacggactgacttctggcgagactcttcgaagcctggcaggtttatattgaatttgcgggggagggaagaggagaggagcgaggagcgagagcgagaggtatggcggtttgttgaagagagggaggacatgagggccagtggacgagatagagatatcagaatggcggctgttgtgttgtcgactgaggaaagagctgccaaatactgcaggagaggggaggagtcagatctagaggtcgataggtaggtggcgtaacgagcaaaggcctcaatgtgagagatcggaagtgcattagtgggcgcccggagtgtagaaaggacagatgagcatatcatcaccgcatcagcgagatcggaggttgcattatgcaatgcgtgccctcggcgaatcagcgaacgcgtattaacgtgtacaccgcgcactatgtcctgggcgtgagtgataaactgctctgtgtcgcgcatgccctccagtgagaccggcgcatattcgtccgcgatagtctctgtgagcacggcagccttgcggtacgatcgatctgcaaccatctcaggctgaagttctggaacgaggaagaactcccacagcatttcgtgagttgaaaaggttggatgagcgaggagcgtcttaaggaaccgatccagcctttcctggagatcatggagcacagaccgtgatggcttcgagtggatctggaatggattccggaaatccgagagagatggcatgtaagatgccggatgctccactgcaagccatttagccaaattctcaaagtcggagaaattacggcgacaggtcgtaacggtgtatgttgtcgatccgggtcgcgacgatgccacggattcggtgggaggaaatggcgcgcctgatttgagaatgaatcgcacggttgcgtcctcgacgaagtacgatcgcacgaccgttgtgacccgacccgaaggatctccgcaagccgatggaggatgggacaacaagatcaaatcatcgatgcgattccgcacctcatcatccttggctaattccaccgcagtcaaaccacgggcttctttaatatgaacgtcgactcttgggtctaagaagagaatgcggacttgatcaactcgcccgtacttgctggccatcatcaacggtgtaaatctcttgtcgttggtcgcgttgggatcgcaatcgctgtcctgcaatatgcgcctggtgatatcagggtcaccaacaatatgcagcagtgtgttccccttcatatcgacatgatcatcaagctgaagcggtttattgtcgccctgtgcccattgcgctgcagtcaaagcggcttggaccattgatttgtattctggatgatcatacgaccgacagagtgcaaagagcggggtttgtccatgtttgtctcgttgtcgccatgggataatgctgccaagtctctctagtagcgagggtgtgctgaaaagataatgagcaacggtgcgaccgtgaacgtcggatttggtcaaataggacgcaaccacgcttatatctgtctttgcaaataggaagtccagaaggatcttaactatctcggtgtgtgcgagttgcaccgcagcgtttaataacgtggtcccatcggtattggtgtcttgaatgatttcttccaaggggtagtattcttctagagtcaacaggtacttcaaagcctcggtctgacgggcctctactgccatcatcggtatggaatgaccagcaggatcttgggtttttgtcaaggtctcaatcgaattgtcaccttcaattccactggccatggatccgagggttgcagtcctggagatgaatgagacggctgatgactccgatagactgcgaacgtccattgaaaccttcttaactggacggtgcgggtgagattcttgtataatcgagagatcatcccaagtttggaatgggaaaacatgggacagcggtggtgcctccacaacagcttcatccaggtatgagtcgccattcgtatgactcgtgtaagagtgatcaagagggagatcatctggctcgtcagcttcatctgtctggaacagtacagactttcgccccggttccggtggactcgtgtcatctattgcgccatgatcctcgttcggttccagtatagatttcatatccgatattctgcccgcttttgttgcttgccacaaacgtctgttccgagcgctggcacgacgtaatccggcggaatcggtgacgagatacatcaaaacagcttcaaatgtacttagagcataccccatctcgccattatcaacgtcgtcgatgtaaataaaatgctgcatatacaacagtcgagcttggagatgccgtgtttgagaacgaatgacaacaataagcaacaacgagactaagacatcggcgttgatcgtgacagaggaagttcccttctcagatggcgagccgtccagttgatcataacttcccgggaaggagataaccttgactgttccaaggagagtattcagcatatcatggggacatcgagcgtcattaatcttccgaaattcttccacagctcgcccaagtcggcgaatcagttctcgcttcccttcacgtccaccttcaacagagattccgacttgggatacatcgatgctctccatctggcgaatgcgggaatccagctctgtgtcctctggttggcggaatgaacacagacgagggaaaagcagcggctcgtgaacttgctcggcgacataacgttctatcagccgctccactagaggaccggtgaggtcagtggttgcaccaagcaacgataattgctgcttgtcaacgaggcggaaaagatcaatggcagcagtcaccgcggtttctaagctccggcgcatgagatcttcgtcgtcctcgaagtactcctcagaattgaatggcaatcgccctctgctgcgtgatgaccagctgcggatagaagagctttcgtctgtaaaagactcgacgcgggacaacttgtggacacgttcactgccggatgcagatggcgaccgagaaggtggaggtggcaatggtttaccaagttcttttccaaactctttgaataatcgttccaggcccggatgcatctgtctcgcaatcatcgggtaattggctagcagttccccgaaagatttgatctcttgttttggtggtgtcccaattgaatctccgtttccatacctcctatctggtgtagtctgtccgaccacgctggcgccgcttccagggactacggctggtatgatcttcgcagggtcatatgttccgatcaacgggcgagagatgtagtaaatcagccatgggcgcgattcgttggacgggttgtaatatagcacgtcggaaagcagttgggcttgtgtgagtgacttgaatcctgatagagatgatctctgttagctaacatatatgggcgagtgcattcaccagcaagtgctctcacccttgttgctgtatactgagttgtccttgatgatcaccgtccggccattaaacgtggtcacctgctttgctttgcctctgttttctcgcatattgctctcttctttcgaattcgcagagacagtgtggattgggatgcggagcacatggctccctaaaaattcctctgacgcgcaaagatcggaatatagcaggttcgactcccggtcgcgtgaaccgatgagagactctgtcgttggaactagcaagacctaaggcgtacacacaagatcaattagccactccggatgatccgccgacatatgcacagcttccacctacatgattctcaaccggtacacactggcccgggacagtgcttcgaaagaaggcacggaggaaagggtttagagggtgcatccaaacggttttggacggcccagtcgaaagactccagcaatcatcaagccgtccgtctcaaatctccgaagcaggggatatgtgcgccgtaagatttcgcggggaaggacagctcgcatccaacaggcagcggcgcagtatgaagccagagcgggtcgttgaattaagtggacagagctgcaaataagctcgaacaaaagcacaatgctagatcgcagaaaacaagaagccacaaatataagagttgacgcagaagcacatgtgtcgcgggtaaatccagaacgtgatcgacaagttgatgggcgctatactgcattgggtaattatttcattcaataaactgcaacctcgggttcctcttgcgtagcttcggagatttcctaattccataagatatttcatcatggcagaaatcatgcatcgggttcaatctccatttacagagaggtgttgcaagtggagtttgtgtagtcctgtcatgagatttctaatatacagagaatagatggcgacaagcatgccattagataaaaacacaaaaagcacagccggtctctccacacaatgcaattcagtacacttgtgctgcacacaagcagccaacccaaaataaaaacatagtctctcctgtggagggagatcaacccagtctacgcacgtgtctgctgcgagtaccaccgaacttcagacgagtcgagtcggtcactcgcgcaacaagcccccgaatgtgtcgtccttcgtggcccagcaggacctttgtaaatgcatcgcggccctttccgaacccacggtacacgacctccaaccgctcgatctccatcaggaagcccttttcctgaatctgattcataacatgagcagacagttggtatgccgggtcaaagccggagcgaccagctttacggaaacctatttgaccgcatccgatagacataagagggctcccgttcggtcgagtcaaggtgaggattgtgttgtgcttgtggcagtagacgtgcaggtggtggggaggagctcggtcggcgtaggggttcttgaccatgtcggcttcgaggctttcagccatcctggagtagtcagagctaccgcgcgaggatagggctggcttcttgccctgcatcatttgggtgattgcagaaagcggcgacgaggaatctgaaggtgactcgggttctcgcttcagaatctgtttctcaatgacgctaccttcactgcgcgcagaaaacgccgtgctttggtgggagaataaacgtgtggtgctcaaggaggagattcgcgggtgagattggcggcatactgatggcaatgccttggtcaacttgctcatcgaaaaggagctcatcgtggtacagcgacaaaggacgaatacgagatgagggaaagagcgatgggttatagaaagccggatcaattgaacaccaatcaccaatccaatgtgttgaaatggccacaaagcgcgggtggtgtagagccgttgccggaccgaagggaaacgctggaagtttttcgaagtcttggcatctgcactttttcccttcccggagatctttacctctctccccatcaccttcttcatatcgcgtccaggctgggctggaatccatcttgcctctaccctcatatttaattctatttgttctcctatcccttcaacgctccagaggatgattccggctaggatgtctgcggcacgagccgtttccttgcggtcccaagcaccgtctctcagagtatcatctcaccggttgtctcgcgccggatcatattcaaccgtctcagctcaagcattcgcgcactctcttaaaagccaccgtgctgtcctacaatccccttcccaccccatccctcaacttgtttcgccgttcgccgctctccctttgacgcggtctttccacgccgcaacctctctttggcaacagcagaagcaacaggaaaaaaagcagggtgaggaagagaaggctgaatcacagggcgaggagtctaaggaagagaaaaaagagaagcaggaagagaaggttccgccaccaccccacggagacaagtctccttggcaggtattccgtgagactctgcagaccgagttcaaggcctccaaggaatgggaggaatctactaaagcgctggcatcctcagctcaccaatttactgaaaatgagagcgtcaggcgtgcgcgcgctgcttacgaggctgcgtcaagcgccacaacctctaaaacttccacagccattaagacgaccggtcaagtcattggaaagggagctgcttggacatggaacaccagtgttgtgaagggcgttcggaagggtgtcaacgcaaccggagagaccctcgagaaggccacaagacctgttcgagaaaccgaagcatacaagagtgtgaaggacgccatcgatgatggcagcagctcacgctacggtggttgggtcgagaaggaggaacgtcgcaagcagcgacagcgtcgagaggagcaagagctcaaggctggaaagtctctccacgttgaggagagagttgaagatcccaagtaagtttagatgatgacaagggttcaatctggcgttcctgactcatttatctccagtgccggtaccaacgtcactcttcacaaagattctgcctggaaagattcctggagagacttcaaggactccaaccccatgatgcagaagctcttctcgatcaaggaaaactacaacgagtccgagaaccccctgatcagcacagcacgcagcatttccgatcgcgttgctggtttcttcgccgaaaacgagaccgccatggtcatcaagaagttccgggagattgaccccaacttccagatggagcctttcttgcgcgagatgcgtgactacatgttgccagaagtcctcgacgcttatgtgaagggagatattgagacactcaagctctggctttcagatgctcagttccacgtctacgctgctctcgcaaagcaatacaccactgccggactcaagtcggatggtcgtattttagatatccgtggcgtggatatttctcacgcccgtatcttggacccaggcgacattcctgtgttcgtcgttacttgtcgcacccaggaggttcacgtttaccgcaagatcaagacgggtgaactagccgctggtacggatgacaaggtgcaactggtcacctacgccattggattgactcgtatccctgatgaagtcaacaaccccgaaactcggggctggagattgatcgagctgcagaaggctgcccgtgactacatctaagggcgcaatctgtacctctccattctatactgccacatttttctctatcatattgtcggcatatttcttcgtggacctcaccccttctgcatcttgacttccactccaccccctttcgactgtacaatacaactgtttggtattaagccaggtagatcctggctcctattacggttatgcctgttccagtgactgccaatttgggccttcgctggttaatcggattttttttcttcatgtattaatgcttcgtccggtctgacattttgccccaagtcttacttactccgaggacttacggctcagtccgctcaaatctgaatgttccatctttcccatagactagggtgcgttggattttatctgaaggcatttctctgggtctcgaggtgttctgctggcgtctgtgcattttattttcactctcccctcgccaccgtgtatgactgcattgggttgttggttttggtttctgttggggccgtaatcggtcaccaagatatgaaaattcttgaaaatcgtgtaaatatataaacagacatttctagcttgatgattttgatatcttgtagttctctctcgagtaccagctacccgtagtactccttccatgaacgtaaacgagctaaagccgtcatttatatagtggacccaactctcaatccgtaatactgaccaacccgaatgaatgccatgctaaagttgtatgttggtgaaatagatttcctacgtacctgtacccgggaaattacttcaaacccagtataaatggaggaattcttgaggattgctttcaatcgacatttgaccgaagtaaaaatggcggttgagggtggatctacgtggacatgagcaagagaaaaggaagtgagtttttttttctttctaaaaaaacgctttgaaaagtgaatttgctacatggtatatcagattgcgtctgtcaatttctcaatcgtcggaccggaaatttagtgcgggccttcagagccagtaccagcaccggcaccagcgccagcgccaccaccacccatcatattccgagccctgtgagctagatgtcagtaatgtgatttcagaaaccctggtatttcataaacttacatatttgcgaggttggggtcgctcatcaggctggacatgtcaggcatgccgccaccctggccaaagctttcagccatctggcggaggcggggattgctcatcaggttgccgagcatatcggggttgctcatgagattttgcgccatggtggagaacatcgggttgctcatcagggaacccaagtcgggcatgccaccagcaccaccagcgccgcctccaccaagcatgctggccagggaagacaggtcaggcatgccaccaggaccaccacgcgaggcacccggagcagtgtccagttcctcggacgggggctcggtggttcgggtggtctcctcaagcttccgtgtcgatgtctccaagccacgcttcatggcctcactaccgccgttgccttccgcctcaatgcccttctcatatgcctccttggcggcatggtagtctcccatatcgaagcgagcaagacccagacggctccacgccttggagtatttgggatcggcggcagcagcaacctctgcatcactcgcggccttctcatgctggcctgaagcggaaaatgcggcggcgcggttggagagatagatggggttggccggggcaatctcgagagccttggtgtattgctcaatggcaccggcgtagtccttcttagccatgagagcattaccctcggacttcagcttatcggattccggtgtgggcacaccggccttaggcttctcttcctgggaattttgagctcctgcggtcgattgcggggtcgacttgttgcgcaacttttcgtagacgttgtagattccggccaacgattgtccacccacagcatccttcacagcagcctcgtcggtagggtcaactttgaaggtatccgcgatacaagactgggcgatttcaatagactcggcatcatcggcggtgagggtaccatctttcaggctggagccgaggaaatcgatgatggccaaagccaagcgcttgttgctttctgttggagcctatcatgaatcagtaccatgaaacaaccaccacaggcgagaagcttaccattatagcaatatttcaataaataatgcgaatcaaagataaacagcgttcaggagtgatcaagatggaagaaaaaacaggcgaggcaatgcggggggaaagcttttgcacgtgatcgtagcttatcgtttccccggtctggttccatgcctggactctatttcttaacatttgaatttgtgctttgggggttcttgtctgctttgctgacggagaattggttccttggagatgactccatgtgagcttcattatccatcttaacccctgaaactgacctgagccatgtactggcctcatggagttcccagggtctacgcggtcaatggacccgatattgcctatacctcctctgatgaggatcgcgaactcctgaatacttcttcaaccaatgatggcaatgcctttgacgatggcgcggaaataagagagagcgacggtcaacatgagtccgcggagacccagccccatgagtcgcaaacaaagtcctccctggacactggcaaatcagaatggggagacgaagctattagaggcatttgtgtttctcggtctgggcagatgtttgccacaatgtcagagtcatcaattgctctttggcagacacgggtatgtgcacaatgccgttatagtccatgggggaagtttgggctggtgactgacaattctggcagcctacagcagtagttacagcaatctctcgatctcagttctcgttgaaaacatatggtccgaatgtttcactccttatgcacccaaattcgacgatcctggttgtacagaccctcaacgggtacctgctcacgtactcggtgacttccgattcgacaacccaagtctaccagcagcgattcgatcattccacaaacccccgtcgacaacaattggcccggttttcagcagttgaagaggccaatgtggttggggacatcaacattcgtttccgaatggctatcaagatcgagtcgggaatcgtcaaggcgctggcgctagatcaagaacttgttgtcgccaccgtgaaacctccagctatacaatgcattcggtggacacccgaggcgggaggagcacaaaccacatccgaactactgagtcgtatcctagggatctcgaagaaggtctcgatcgtggacatggtttacgatcgtgcgatgaatctcctcatttggattaccagcagtggccagacatatgccgtgcaacgagattcaggctcacagcaggatcctgaagcagcaaagaaactcttccacggacattgcttccatgatccgaaggatgacagcgaaaaggccgtgaaagttactgtaaatgcacgcttctctctgttgactgtgagctgttcaaacggtgatatcttagtttacaccgcaaaggattacatgggcaacattccactttcacaaaagctccatctaccagcgtcgcccacaaccactggggctttgactttcatgagctattctccggatggatattgtctctttgctggtttcgaaaacggctggacaacatggagtgtttttgggaagccaggaggaaacagcttttccgtagacactacgttggcgaccgccaattcggaggattggttaactggtgtgtcagacgggtgttggattggcggcgggtcggacatcattctgtctggacaaaacgaccgtcgcctgtgggtcctggagacagctcgcagtgctttgactggttgtttttcgtctgcaaacttggcccgaggcctactgcagaccggtactgagtttatcctctaccgcggtcatgatcttccagatctcatgacaatatcaggaaaggattcattgtggcatcatggccagtatccaccggcatatcttcattcacagtggccgattcgatcttgcgtcgtgtctcaggatggacggtatgtggcaattgcaggacggcgtggcctcgcacattacagtgtcaatagcggccgatggaaggtattcgaggattcaaaagccgagagctccttcgctgtgcgaggaggtatgtgttggtatggccacatactgatcgcagcggtggaaagtgacgggtcatacgaggtactacatatctccccctgttttggtgcatgactgatttgaattgaaagattcgtctttattcgcgcgaggcttctctcggtaacaattcgattatgttcatcgaatatctcccatcaccagttgtgttcattggaacctctggggaagattctctcttggtttatacatacgataacattctgtaccattatatcattaattcgacacaacctcaaatcactcttgtccctgttggacagattgctttccatggaattgttcgggcgccctctcgcgtccgatcgatcagctgggtattgcccgaggagcagatgcgtgagttaacttgtttttatgcagttgttcgagcacaacactgacagcaaagcaggaaacggtgatccatctcaagatgtgaaggtcgcatctgtgcttcttcttgtggacggcaatttggtattgttgcagcccacggtctcagatgccggtgacctcaaatacgacatgcgcgtcatatcccatgatgtcgagtattatatcttgatgcgcgaccaaatctccttcaacttttccttgcaggttgatgaatccctacctgctagtccttcggttgatatagcactagagccacctcatagtagtctgtcgctcagggactctctttggatgttccgtggtcaaaacctgcttgcttggaatgatgttcaagatgtattgcgggaggagatggtgccggcaccactcgacatccccctggacttttatccattgtctgtgttgctgaacaaaggaattgtgctcggtgttgaatcggaaatgatgcaacgtcgcgatgtgaccttcactgtcctgaaatttgccattcgggtaagttgttttctctatcgataacaatttgtactgacatatgcacctcagacacacctcttcttaccatatttccttcaatatggcctggcgagtgtcggaacgcccgcggctctcgctctctgtcgccatttttcacatttgtcttacttcgctcatggattggaaattctactccaccacgtgctagacgacgaagtggataatgagagccgagcgaataaaagtgacaatccccaagcacgagcagaaccactactcccaactgtcattgctttccttcaagcctcgcttcccgccagggattaccttgagattgttgtacaatgcacacgaaaaacggagcttcgctcatggcgcacactgttcacttacctgcctccacccaaggatctttttgaacaggctttgaaactcgactccctcaaaactgctgttggatacctccttgtgctgcaagccttcgaggatgaagagcatgggcatgatggccgcattgaagaatatgttgttcgtttgattgctctcgcctcccataagggagactgggagctgtgtgctgagctagcccgcttcctcattgcgctggatgcttcgggtgagatgctccggcgcgcaatttcccgagttggtctacgacccaactcgcagccttctgccaaaggcacatttcccaactcggcaccccgattcggtcccgcaggtgttcaaggtcttggcttgaacctcccaatgaggtcgccatcatgggcgtccctttctccaacatcgtctctttcgcctcttcccagccggcaagatggtgatgtgttagatgaagattgatattcagcgcatgggcaagatagataattaaggtgttgatagaacaatcagataataattgaacaacaatctcttggttgcttggtgacaaaagataagccattaccgagatgactcgagaccttgcaaattcgcgagagccacctcggttatgacaatatataccagactctttgaataggaaatatgatattcatttgatagaaagcactatcacgatgcaaggtgcttacagatatatcctataataatctcctgatgcctgccctggtaattttccttcctgtctgactttgaccaacagcacacaggttacaacccaggaactgctcgcctgcttcccgagtgagggcttttaaattcgttcgcatttgcctgaattgcatcttcttttctccgtagacatattgcaatctccattagaggaacaggagtcacctgggcatttatgttggcgtcgagttgatacatggccattcgtgtttgccactaggtaattgatatcaacaacttcgcacttgagactctccacttgaccgccgacataggcttttgggtgtttatccgatttagatgccttgaacatgtaagaatgggagcgatcgaaaacaaccaattcactttcgcatctttcaccactgactcgaataattaacatcaatcatagagaataaaactggatttataacctacccgtaaagtgtgcatatctttttcttgcctgatggcgcttcacaggggatatatacggacccgacgttgcgatgactagcagagattattagcccaggacaaggacaaccagtcatgcacgtactactctttgtcaagtttttgacatgtcccgtcaagatttaggtccatactgtgaccctggaagccctgggtcgtgtagacacggggcttcgggcaaatatcagtctggccaaaagccaccaacggatgaaacaccagagcaaaggctatgacactgcagactagcatgaccgaagataaaaattagagctccaggagataaatagagttgtgaaaagcatattggcaagtagaaatatacatcatgcctcaaggccgggtgtaagtccgggttgacgggggtcttgcgtaagggctactcctactaaaataacccgaagacagctctgaggttaattatcctagttgctgagctcattattctctattactattatatatagtaccaattttaagaagaaggatgtaacctgtacattaggcatcaattattgaccagaagagacaatcagaaaaacttcacttaacataatcaacccatttatgttgatgcaatagcaaacagaacttctactgcgatcagaaaggatttatcaaaatcgtagcactattagccaaatatatcaagccatcgaacggaggctctattcctaacacctccatgtcaaataattagctcgaaactacaagagttacctaataaagaactattcacagccacaaaaatttatgcagtggtgtcaagcagttagcatacggatagcctcgatatcaaatcgcaggtgtatctcgtactcacggccgatagtgtgaattctagcaatccgacgggtacctctctcccaagctccgagcacaacgcatgccgctgccttacctagctgtgtacctagaagctctcgatactcctcggtaccatactcccatgcgtgactctcaagacgatcacgcgtaggccaatccaaatcatgtctcgggtagaggatttcctgcacatagggcagggtctcttcattcacgatattagtaaaataaagatatttgagagtatcgatggggtggtcaaaactatattgagcgatagcgacattggaccaatgaggccccgtgtacctgtaaatacattcagcaattagagcgccttttgcgaagctatgttgatactgggtttcctttttgtcgccatccttgttatagccatagtggaacagtcgtgtgaagcggtattttttgtttgttattgggagtcctagggttttcaagtcatccctgatggatttaggtgggtcatcaaaatggttcactggacatgtaaatctttctctcttattgctgttattgaacagatcgaacaatgtctgtctcgcttgcccacaatggcagccgcctagagttgggttggcaatccatgcttggtatgcagctcctttttcatggaacccacagacttcatcgtccgacagtgggggcttttcatcacctaaagggctattgaacgcaattggagtcattccattactcgatgtactgctatcatcgggaatgggatacaggagaggagatgctgaaggttctgcgattccttgcgaaagtactggggactccggggatttgggattcagacgccgccgagttggggagcgagaagaatcactgtcatcatcgtggctgcgcctccgtttgtgtagatttggcttatgtggtttagttggtctgcgtagccctgctggtcgatatgccattttacagtcccgcggtttgttttgtgttgtgcagaaaagatagacaattcgggtgccgttatattttgtagagatattatctcagatgaatacttgtaatgagcaaacgagaaacaatatgcttatatagtgctgatgagttggccttcataatatgttggatggggctattgaaagaagaaagaaacaagccctcgacagaaatagaacacccaagagctcacccaagtcatgaatataccaagacgtcagaagattgtatgtacaaagagagtagatacccgcgacaaagagcacaaaaataaattcacaaagagttcgaggcaaaacaaagcgaaacaaattgctttgttgggacaatactattctaagctataggctatattaacccccaagctatgggtgagatgcttgtaataataggtgcggtctatgattgacacaaaattattctgagagattaattttagaatagatgccctatagagcgagtgagatagatacaggttatgaagtgcagtgccggatgtggtaattgaccaacttgagcatcaagaacaagcgtccgaaacagctagttccaatagaaacaatcaaattatatcacaagacaagatggatatccttccagcctaactcttgagagatgcactcgtattcgcatattcggttgaaatactgcgacatatgttggcttaggtaaacctggaactgcttggaggttgctgtgtacaaaatcactgttgtccctgtagcaatcctgggcaatatccgatatcccacttccaccctccctctttgacaagatatctcgcccgtattcatatcttactgctagtaagatggaacatgcactgctcgcagtcgtgtaaatatctcccggctacgtgtgcctccttcttgtcctgtgccagtcgccctgatgtcgctgaacccggccccgagctcacgcccgagccagcagctgtcccacaccaacgatgcatcgagatgttctccgactcggctcattcgcgccaggtcgtcggtcaagataacagctcccattccatttgaattgttattgcacaacttgactgctttctcttctgtatcaaatggcaagacagtggccacaggcccaaagatttcctcctgtaccacgggactatcagtgcgcacgctgctcaagactttagggctgatccagaaaccatcctccgggacatcatcggggatcctgccaatctcaaacctggcatgttcttcaccagcctgtaccaagtgagatcgaatcttggaataatgctccctgaacacaatcggaccgagttccttgtccaacccgtagttactgtgaacatatcgggtaaacttgagcagaaacatcctgtaaatcgatttatggacgaaaattcgagagccgcctagacagagttgtccgctgttctcaaatgccgcgtaggctgccgcagagaccgcctcatcgacatcgacatcgccaaagactagtattggactactgcctcggatctcgagagacatgtgcttgtgaatgtcagccgccgtgtccttccgaatctgaattccggtttcgatcgccccacagaacgaaactccttgtacaagcggcgagcctataagagtggaaccagtgtcggttccatttccgaaaacaatgttcataacaccgggtggtagctctgcttgccgaagaacttcgccgaacactatcttcagggttagtgcgttcatgtaagttcgtcaaataagataatctcttacaaaaggccgtcatgctagtcagttcgctcggcttagccacacctgtgcagccaaatgcgagacagggggcgattttggacgtcaagaggaaaagcggcatgtttgatgaagtgacaatgacgtagacccccactgggactcggtgctcgtgcgtgagagtcgaatctcctgtgcctttgttgagatgtaccacactttcgtcgtgaagaatgtattttgcaaaatatctaacaggaagaaaagttagagtcggtcatatacatcagacgagtggacggaccggaaatgctcaattgaccgatcaacttcagaccgagcccgaaagagagttttgccttggtcaatactctcccatactgtaaacatatctttcttttcctccagaatcgacgcaactcggagtagaagatcagaccgctcgtggggtgtggtctgtgaccatgctgggaaagctcgagacgcgacatttatagcgtagtcgacgacgtttgggggactgagaggcactttcagcaagagtttgcctgagcgaggggaaggtgaatctatccattccggtgtgtgtgcacaatcaaggaactggttttcgatgaagttctgaagctgaagaggctcattcgtggagttagtgaggtggtccgaagctcgcaccagggtatcaagctgccacaacgtagaaattgtgttcatgattgctataattgtagtgagagaggaattgaaggcagtcctatgcttgggatagtgaggctgagatcagggtaatgtgtgtgatacttcctggactcaaagataataccttgtgctgcggatgttgatgttattaggatgagacgcgtcgaggaagatgaccataatgattataacaagttcgcctgtttattacaccacttccacccactcagtgagagatccaaagattaaccaaaacatatatgagatgatacctcactatatggcttcttaattggctgatttgagtatatgaaaacatcttctataatattagaaactcggtagttctttcattctgctatcagaggcagaatgaatatcaaagcgtttagcagatcactgaagcttcaaaccaacatggtacatggtccccgaggtcttgcttcctaacacactgaaagggaaggcccgagaattaagccatattgcattgctcaacctcgcaaacttgtgtatggctgcatatagacgaagctgagtacatgcctgtgatctatacatgaaataacacgtgatgtggacccactttccccttcgggagtatatagggcacaggaggtatcacccctttcatcttttttttgattttcaccgatcaactccctcctgcttttgtcgtcttgtagagcagcagaacatattatgtacattaattataactaatactaaccaagtacatactaagtgttgatgatctgcaggcataaacgttatattcaggcatcaacatgtgagggcccaccttccattttcggaagcatctattcccatatatttcacagcaacaccttccccctaaccgagagtcccccagtggctgagtgggctcgcatgcatgtacttggtcaatccagctgcctgcgttcgacctgctcagtccacaatcctaaactttccaattatgcacccccaaccgtcttcttcccaccgcaggtccaggaaccagttctgccagcaggcaggaattgaggatcttggggtcgaacagattgtcagagagctttatgggccaccaaaattggtacattggttgggcagtggccaccactggctgggactctcattttttgggtgttttttttgttttccttcccctttctattttcctctcttgtcttgttagcgttttccacacaagataataggaacccccttgacccgaaggaatgattgcaaggcttcttggctactatgtagttgaaagataaattcactccatgtcagacaggtctgttaacccgtttccagccattcgagcattgtttctcaaatatagccgaggctctcaagctactattcatgcggccaagagcaagggtcatagacataggactgcctgctttgtcatagacaaagccaagagaattcacgtataattactcgggttgttcgattctttcactctttgagtctttgtcaatttattcaaacaaaaatgctgcacaatgccattaaccaggttctctttgttacttgtccgtattatttatgctcgcttcgagcatataagttcgctcgaggtaccctgttgtctaattggaccattggaccaattatatcccgcaatggcttttaagtatccccagtttgagccgtatggagacaagctaatccgatggatggaaaatgccaacgaacccgggtgcccagttcctatgactacacttaagtcacagaatcttccaaagtcgccggactggaacatcgagtacgaaagagaatggttatcaccagatcgtattgcctctattgtgggtcttggtctgcgagttggagagctaattccaaacgacttatatcccacagagtccccatgtctacggcattcaatcatcaaggcccgtcgtaatggaatcacagccttggtggggacaattgcaccaggcgtactttttgtttattctattaggagataccacgagtcgaacgatccgtatatatcagatcttgccaagattgcctatggaacacatttttcgctggatagtttgaaatatatcttcatgaacgacgtgcaggaatctgcaactgaaccatttatcgaggaacagatctatccatctcgtgcgggaataaagtatccatctgcagagagtcagacctgggaccatccttcgccggagtttagagctattatgggtacccctatcggtaaagttgtcggatacttcattctaggtgcgtttggtcaaggtgtaaaacgggttgcacgaattgtcacttttcagactggtcttgaccttcacaaactggaaattcgttttgatattgaagatgttcgaggaaatctttctttgggggaatttgatttagatataatatcataagagggagatagagtggggacactaatcaattttatattataggcgtatcagaatcttagattggggtagccctcaatcttctagcagtttattgtaggctaataacgatattggctaaaaggatatcaagtgataaccaatagtcaacacactgcatccattactccgcataggtgagggcgcagggccaagccactcacgggactcggcccgggccgcgttggccttttcggtatcaaagtggggatgtctgagaggagaccaagtcggagatgactggtctgtacggctgtggggccaaggaaggaggtttgtgggtgctaggactgaggtcaaacctagcttgtttgatggttcgttactagactttaattcattgaatggtctttccacatcatgaaaactaaatacatatgcagtgtcatgatcaatatatgctaagaccagttctaacgctcgttacttaattcgcagccccattctcccgttcctttaacgcttgacgaactttgggaatcacgaaccgtccataatcaatagcgtcgttgagattatcatagcctcggatagagatgaggtcggcaccaagatcaacatagtcaagaagcgactcgacaatagtcttgggcgatccaaccagggcagtggatgcaccacgtgcattcgttgcagtaacagtaggataccaaagagcgcggtcctggacttctccgcgagcggcaatatcaagaagccgctgagagccggcgttctgtgggggcggcgcattggcggggaccttgccttgtcctttcgctcggttggtagtcagtgcatcgagggtttggtgtgctttcgcccaggcgaggtcgtcagtctcggcaagaataggacggaaggtcacccagatgcgaggtctgtctgagtccgggcgaccggcctttgctgcctctccatagatgcgatcaatctggtcctttgtttctttcaaaggttcaccccacagtccgaatatgtcagccagggagcctccaatacggtatgcttcgtccgatgaaccgccgactgagacaggaattgtgccgttagtcggccgaacgcggttgctgaattgtttgaaggtatagtatttgctctcccagtcaaatggctcatcggatttccatgcgcggcggagaatttgaatgtattcctcaaggcgtccgtaacgttcatccttagtcaggaagtctccttccttagcctgttctgcatcgctaccacctgcgataaagtgaacaacgacgcgaccggagctaagttggtccagtgtagctagcgcctttgccgcaactgtggggtaaagagtattgggtcgcagagcaatgatgaccttgatgtttttggtcaccgacagaatggtggctccaatggtgaatggatcataggatgaggagtcgtagggcaccagcgtgtagttgtaagcatagtcatcaaggttgcgagcgtagcgaacgagatattcaggatcaatcgaagcgttgggaattggatggatctcggtagatgcgttcgggaacgtgacgctgatgaattccggcatggtgactgcttttttctgccttttgacgttcttaattttcttgtcaggtactattttacttctcattcgtggtagaccgatcttcttttaatacttcgtagtatctccgagttgatttggcatcaacgcatgacgcaagatggtaagatattgcgtcttagcacgcaagtcgataaccatatcgttccacaccggatcagatgttttggattttcctaattcaagtaagcgttacttcttcggctgcattcagtgaggactagtacgaggaccagaaggtattgcgccagtattgcgcaagatcgaccatgggaatcgcaatatgaagttgactagcacccaggtaagcctatagaaaactagccgagatcgcagttcaatttccgctgacttctccagatcttcaatctcttgataacgagttgcagggatgtccatttatgacacattgatcactgagataatatgcgtcgtgatgtggtgccggtacagactcatgccaggctagcttctgcctttaacgctagttgccggcgggttaatctatatccagggcctccataaagtgcaaaggtcataacaaggttggtcgttctgctcaggttccttcggcagagcgtacaatatatatcccgagatctcagactctcggggttcatcccaaatgcaagcgagacgtgtcctttaaggagttatcgtggctatcacgcgcaatttctactccaaggcagtattctgtggttttttcctgtgagcctcagctgagtgcaaacaatcaatggctgaagttatagttggaccagcgctccggccaaagacccggcagcttggttaattcgagaccactcgcctgttgctctgattgagcttgcattcgatttccacgcaatagaggtcaggccatcggtatacctctccaagaccgtcatatgtgatataccctgtcagacttggttggagtgcgttgttgacgccttgggccggtccaccagcccaagtgggcaccccatccgccgtcagatcatgactcagcattcaggtccggtcgcacgtgccacattcaatgcgagtccctataggatctatcgaatacatagaggaagattggtttgaatcttgaaattcatccagcttgacatcattaccaggttcaaaccaataaggaaagcgacaacctgttgagaggcgcgtgatgataagacgctagtctaaatcgggatactacgtcatcgatgagggatgggttatatccgcgacatacctcactccatcgtgtttcgtttacacatgtttcccatttgaacaaatctactacattgaaccatccaccatgccactcgttgtcccaggaatcaacagctcatttggcgataagtccgagtgggtcaacaagctgatgggcaagacgatcagcgacactactaatgagacagtacgtcacctttgagaaatcatcgaaatcaaatatgacattctaaccgttccatagtcttttgcaaagaaggatcttcctgaatctcaccgggtgttgaagccaggtgacgcgaagaccatggatcacaatccaaacaggtaaagcctcattgcaaagtgccgtgaagccaatgaccatgttgctgacggtgtacgattgaacatagacttaacatccttgttgatgatgctggagaggtgcatgatgtgaactacggttagagctaagatatatttactaagcctggtggctcaaatcacaagaacaaattgagccaattgaatatctattacttgaaagtctattgatgtcctcaaattagcatcttgtatgggctaactcactcggccttccatctgagtagagtaagggagtgtcgcgggaacacatattgtccacttccagtccaggtcgactcttggatcgccacttcttctttgccgttcagatttgtcacggacagatcgcccgcggtgaccgtgaacacagctacttctccctgggctccctcaacatgactttccaagtctcgggagtcgtgaatattcaccacagcaacattaacaaacccatcatctcctacagtggcacttacatctaaccacggcgtatccttggcacttcgaatccacttgggcgatgtctcaccctcgtatgttccacaggaaacatgactggccacggtccaaccacgcatatatcgtgaaaacagccaaagcggccaccaggtggtctgcttggtaattccctctggggtagtcatcaagggcgagatgacattcacggtctgcgcgatacacgccatgctaacatccttgctctttcggacaaagacattcaaccagacggccacggcgagcgcatcggagagcgtgtaattctcttcggcacctaggctcccctctgcgcggattggatcccacacgttccactcgtcgaagcagatcgtcgggcggagttgctcgggaggaactttgttctcaaccctggcaaggtcaatcaaagcggacgtaatttcaattgcgcgctcggcggcgagtggcgctgtcacgttgaggaggtgggatgatgaagacgtgtagagatggatgctgtgcatgtcaatcaaagggactgagctggttgacaatgcggagtgggcaggtacaagacactgatttagtgtgtagtaatcccacgaagcagtgccatcttggccgcagaggatcaagatcagggtgggatccaggagtttgagagctgtaagaaaatcatattagcgcgattgttctggtagtattgaaacgaagcattacctttagcccattggattgccttgtgagcatacgcttccttggtcatctgctcgacctgccaaggaccccaacactcgtttccgagggcccagtacttgacctgttcagggtgttagatcgttgcagctgaaaattttgcacttattacatacattgtagggctcctcacgaccattctttcttcgtagattggcatagtaagtattgcccgttccattgcagtactcaacccaacccaaggctaatattgtccaacatcagcatgttgtatcaaagtcttaaataagaacgtaccctcatccaaggtaccggtaccaaagttgaagcaaaggtacggctccgtgcccagagcttcacaccattgcatgaactcgtcagtaccaaattggttcgtctcggtcccgagccaagcaagttctggtctttcgacagatcgacatcagcaaagttccaccaaagttaatgtgatatgagaacataccttgctggccgttgattcttaggaccaataccatcgagccagtgataggtcgcacaaaagttgccaccaggatatcgaacgacagggatgttgagccccttcaacgcctccaggacgtctttgcggaatcctttctcatctgacagtgggtttccagggtcatagattccaccgtagatacaccggcccatatgcctaagaactagtcagtttatgtcatgagactggaagaagttcaagatgccttactcggtaaagccggcgtaaatgtttgggttgatcttggagatgcgtctcgatgggtgcacagagatgagaggcgtctcatgatcatccaatttggtaaaggtcgtcattgtttgcacaaatgattttgtttctactgtttgggttgaggcgtcacttctggctaaatatgcgatttagcttggatccaaggtcgcggttcactttagggaaaaggtatttgaaaggcacgattcaaggtagacaagtaagaagcagatgtatactgatcgcagataacctatcgaaataaccgagggttcaggccttgaagcggcaaaactcctgcgggggaactgtcgtgagatccggatgatgacccctgtattagccctagtagccctagcagcgtctggggtggctaccggaaacacgagacgaagcccttagttagctttctggatcaatgatagatcaacagaccaatgagtcgcagtctagctttaaaatgcccccggcatgagaggaaggtaggagatattccatcaatcacagacgagatcacgcgccacatttatttgccaattcctccccgcatgcttgcaactcgtcattccggaccatttctagcaaaggacaaaatatgagaagtgattggtgaagcagtttccgcattccccatgtttacaccacgcgatgttagcccagttcaagcctcgacttccccgagtatacgattctccgaagtcatggctaattgcatgggtttctctgtatatgtagagaagattccccggagaatttgtggcatgtggaggtagatcttcattccccatattcttcgatataatatccactctctaaaccatgcgtctctcgccgtcgtggtaccaggtatgaagggaccactgcattgagaagacggagctcatgctttgatatagttcctggtcggtgtctttgcctctcttggatcattcctttatggatgtatgtcaccaattccctacgtgacacgcggaatctaataaattcgcagatgatctgggtgtaatcgctgaggtgctcgtctgccaatcatttaaagccaaattcaaggcagatgatacccaaacgtcagtcccataacatatggaatatgggaatatctaacgactttgcagaggattagtcgtgtctttattcacggctggcgcatgcatcggtgccggacttgcgggcgccagtggtgatcatttaggtagacgacggaccatctcattgggatgtttcatcttcactctcggaggtggtcttcagaccggtgcgaggacaattgcctatctatacagcggacgattcctggccgggttagggtatgtgatttctctcaaaacagataccccaataagcactaatcagattaattcttagtgtcggtttcctcacaatgatgattcctctataccaagccgagatctgtcaccccagcatccgtggtcgagttacggccttgcagcaatttatgctgggtattggagcgctctgcgctacatggattggttatggaacatacaccggctttgcagaggataacaatgcgcaatggcaactgcctctcggtttgcaaattgcccctgctgtatttttgggtcttttgatctctttcttccctgaggtagggtctgatttccatcgggtgaactccaataactgatgtttatccagtcgcctcgatggcttattgaccacaaccgcaccgaagagggattgcgcacattggccaagttgcatgcgcatggtaacgaaaacgatgcttgggtccaggcagaattcgctcaaattcaggagagcatcacgtttgagcatgagaacgaggcgaagtcatatgtcgagttgttgaccaatcgctcctcgttccgtcggttgttcctctgctgtgcattgcaagcctcagtccagatgaccggtgtatccgccattcagtaagtgtacaatgacttaccactgccaagatatgtcagcatagaatcaatcagctaatatgatttcgtgcatagatactactcacctcagatttatggtcaaatcggtatctccaacgaagacaccctgaagtatcaggcaatcaactctatcatcgcgttggtcggccagttcctgtgcatgatgttcattgatcgcttcggccgtcgctggactctgatcagcggcaatctcggcaacatggtgaccttcatcgttgcaaccatcctactcgcaaagttccctccatcgaccaacaacaacggcgcgcattggggtttcatcatcatgacttggctgtacaatttctccttctccgcaacctgtggtcctctgtcctggattatcccagccgaagtgttcgacactcgcacacgtgccaagggtgtctcgattgctaccatgctttcgtttgctttcaacacgatgatcggccaggtcacgcccattgcaatgacgaacattggctatcgttactatttcgtatttgtcatctgcaacttcaccaatgcgctcttcttctggcttttgcttccagagactaagcgcgttcctctcgaggaaatgaaccagatgttcacgaatgcgccatggatcgtgcccggaagtcgcaaagaagattatatgactcatgacctggagcggaaggttgaggagcaggaagtgaagcataatgcgttgcatgttgactagaataggaacaaggggaaggactgtaggggacatcgttggggttgcatgtgtggagagctcagttgtgatattgagatacaataatgaagttgttacccgtggagaaaaatgttcgtaaaatcgatcggccttgtaatatgtaagagaaggcactaaaatagatgacttgagaaggtcaacaaattggatatgagagatgatctatagatactaatgagaggccaagccatgccctcttattatacctgtagagacattgcttattcaatcattaatttgatctacatcatacaatgctaagatagattttgtgctaactcgaggtcattcatggatgttgttccatcattcagaatctgagctgtatcctgccaagccaagcgaaactgggactggttttgtcggaattttggactttatttgcccctcctctgtgtctgttaccaccttgggctgtgtggcagtatttgtggtttcgggtgatgtggcagaagcagcaggtgtggcttgatcggacttggaagtcccttgatccagcttcttggtacttgaaataccagatccaggctgtttctgcgagtccttcccattctgtgtgtccttctcagcagtaatctcggtgactgaagctttacgcttcttccctgcaatcaatgagttcttgtgtttatcgctccgtctcttgcgagccagtgcggtccattcttctccttgtatgggtgcctccgacgaggttgattcaagcaatgctttctgcgccttctcgcgctgtcggcggaaggattcaagttgttccgctgtctccctcttcacagcagcctcctgggcacgtgttgactcgagaacagaatccaggaagtcgacttcatcttcatcgagggatcgaaactggtttttgagacgcgatttctcttcaaaggcttcttgtttggccactgtatgataaccgaggaaaatcaccctaacatgttagccagattcccggatgaattgtccactactcttctttgttcgcgcagacgggggccaggtatccgagttgggctcacttttattgcgctccagcacctcgaagagacttttgccctcatcctgcttccctatttcggccttccgtctccgctcctcctctagctcctgctgcactctaagccactcatcgtcccgctcgatcggcttctcatttgttccggatgaaacgaaacccgatgacatagtgatcgggctgggtaaatgggtcgttatggatcacgggatggagcactgggaatggtcggtcggaatgcgaaattatccggcgacgggggtaccgatatgggacgtggggtggaccgaaacacgggatgaaaataaaagagattcgagaagttcctagaaagttgaggtttcaggtaattgtgagacccggacagttcggagaattgcaagaattggaggggtggatcttaattggaagatgtggaccaatatgagttgcatttagccagaatgctgtctcttgccctgtcacggtggaactggatatagccagtcgggtaattcgtgatcacttcatccaaggacacccaatttgttgcgaatacgacagaaatcaagagagataacgtccaatatccttcgatctaaacccccactcccccctctctcatctcccccacgacatcatcgcttgctcttggacctgcccactttaaatctgcttaccatataaagccaaggtgcctcttgatagtctttttttaaaaaattcattcttgcggctttcaaaatacagcaaaatgtcgaaccaacacaccgagtgagtgccttacaatgcaatgcaatacgcctcccctccctagccattgcattaacgcttacctctctcttcaggaagacctataccctcaacactggcgccaagatccccgccatcggcctgggaacatggcagtccaagcctaatgaggtccgcgaggccgtgaagaacgcccttctcgccggttaccgccacattgacactgctctggcttacggcaacgaggctgaggtcggtgcgggtattaaggactccggcgtgccccgcgaccagatctggctcactaccaagctagacaacccctggcacaagcgcgtcactgagggcattgattcctctctcaaggaccttggcaccgattacgttgacctctacttgattcactggcccagctccaccgaccccgaagacctgtctaagcatctgcctgactgggacttcatcaagacctggtaagtgacaccaagcatccacttccaaggttagtggggaaccattgctgactcctcatgtctaccacaggcaagaaatgcagaagctgcccgccactggcaaggtccgcaacatcggtgtctctaactttggcatcaagaacatggagaagctcctgaatgaccccagctgtaagatcgtgcctgccgtcaaccagatcgagctgcaccccaacaacccatcccctaagctggtcgcctacaacacctctaagggtatccactccacgggttactcctgcctgggctcaaccaactctcccctatacaaggatcccactctcctgcagattgcggagaagaagggcaagactcctcagcaggtacttctagtttggggtatccagaagggctggagtgtcattcccaagtccgtcagcaagtctcgtattgagggcaactttgacatcaatggttgggacttgactgccgatgaggtgagccaactcgataacctgaaggaccgcttcaaggtctgtggtgacgattggctccccgtcaaggtattctttggcgatgacgagtaaatatgtctaaaattatgaatgttttatgagtacataggctttagataccaaaagagtcttattgacacccaaaagctcaatattattggtgaaacttgcgagatttcagaatccactgcgatgtcgtcatagtaccaaacataacataccaagcaaactaggcaaacatagtcattttggtcacgccggtggcggggcacagccactgcggagcctcgggtctgaggcggagagataagggtgtatacccgtggaccccggcgtcatcaggcatccctcctgtcttctcagcatccattcccaccatctccatcaaactattcatcgctgagacatcaccatggcaccatcagcagggcacctgctgcttcctaaattttggagggcagcacggtatgtctccccttttctgtcgccatagcgagttacaatggatccattgactgacatcctcctaggttcgcctacgaaaaggcctccaaggctatacgtaacaaactgccagagcctacacagtattatccggtgcggtatcaacccgcctatgcccgaatcaaccctcgtcagccaatcagccgtgccgctgccattcgtcaagcccgtagtcgccacttctcgacccgtgctggtgccttcaccgctgcgattcgatccggactagggggcaataatgccgccccccgtaacacctctcgcattgtgtctaatatcagccgactcagcagccgtgcacctttcgcttctacccttcgtcccaatctgaccggcggcacccttggccggactgcaggaggatacgctgctggagctggccgttttggtggagctagatacttttcccatggccctgctgccccagcacaagttattcagaatgtgtctcagggcgtccgtgctttctttctttctgggcagaaagttcgcttcgacggcatcgatccacgcaccggagagaagcggtataagtcagtcagcgcgctacaggatcaggcggaaagaaagatgaatgccaacctgcacagcgcacctggctcgtacattgacttccaagtttccccgaccatcactgcactcagtgccgttggtgctctcggtaaccaggaacgctcctcgtgcgactctctgaactccgagggcctgatggatctgctctctgccgattttgcccgtgctttgaaggatttctccgcggtaatgaacgacctgaagcgtctctcgtcacttggtgatctcccgatctcccttcacgaccgatcgactatacgggtgcgcttcccaggctgtgatgcagaaactgtagagcagctgtgttgcgaggtcgggattcagcgaggccgagtcgtgcaggatgaagatttcgatattcgcactggcgctgatttggctctcttgttcccttttgcaccgagcattgcctcttcgtccgacactgactattacttcgagaaagccccaaaattgcaatcgcagtatccaccggaccttgactggcaagggatgatgacaccagaaagctgcacgccatcgtcaccaagtggcagccgtgattcgggcaatgctatcagtttcgaggacagtgagctatttggtgctaatccatggatatcttcgaccaagagctactctagtattaacatcagtgagcttggagatcagcatttcttcccggaaatctccagctctggtcaacccgacagtaactctgcatatgaaggtattgagggaatttacacgttcctagctgagtgcgatcaagccaagcgttgacgaacacactcatattgggccatacttttctactattaatgttttttatctctcggggttttttccttttcctttttttttctttggtacatatctcaggctgagaccgggactatatacatgacgacgcagataccactccactctttaacacacttctttcagtgttacacttgctcaattgaatgaatcagattgaaacttgcttgttcgctttatgtcactggtggcctagtacatcgaggaccggtcagctatagaagcgattgatttctctcaatcctctttggcttttcaaaatagccctagaaatagccactcatgtcatttcagcctgcacaccttcgtccggcctcttggaccattacggcctaaatgattgtttcatataaagacaggccggctgaagaatgcgccacggtgcggggtccgggggatgtgaataatgtggcttgccgaaaggaaatggcgttttttcttggcttggacttttcattatgtcgatatgtcaggtctctggagtaatccgtattctattgcaatggattctcgaaattcttcctcctttgcctgggcgaaatcagcttgttttgacacccttcctgcttctgtttgtgattttgtcttagggaaggatccttatgcgctatgttagcagtcgatcacagacgagcagcttaaccttacaactggcgcaagcctaatatggtcctcccgcgccgagtctggggaggatcgacgatgagtgtctcgtttggggacgggggatcaattccgcgctgatgccgggagtttgatattacatcaaccttcctctccttgactatctaggcaattaatattagtttcaaggctacggactatttagtgcgatatgagctatgtgccatcgaacccggatgacacaggtttagccagatttaaccacgtgttagggcagaaattgcttgtatgccttctctgttatacatgtgtgtcttggcaatgtctggaaatggattgaacggagatagttctgatctcttatagaatagcttgatacaatgtagcgttggcttcgggtttccggtttcaatcccggcaaggccaacaaggcaatcttgctggggtatataaatttatcgaattctcccacaactgttaacaagatcacaggaaaacgagcaaaactcgaattcattgtttcaagatcatcaatatgcaatttcttcttcttccattcgtacctctgctggcttcttccgcagcggcagctgcaatatccagcgcagctagtccagctgtcaccgctgcagcttctggaaatcccttctcagggtaccagccctatgccaattcgtattatgcatcagaagtctcatcctcagccttgccatcaatgacgggggctgccaaagccgccgcaagtgcagccgctcaagttccgtcctttttctggctgtgagttcattgcactggtattatatatccctcgggcaaatactcagattgccttatagggatactgcagacaaggtaccaacaatgggcgagttcttggccgacatcagggccaaaaacaacgccggtgctagcccaccgattgctggccaattcgtcgtttacgacctgcctgatcgtgactgcgcagcattggctagcaatggagagtactctatcgcgaacggtggtgttgcgaattacaaggcgtacattgactctatccgcaatgtgttggtcgaatactctgatatccagactatccttgtcattggtgagtataccttgctgattgatggcttcccgcacggcaatagtgattgctgatattttttctagagcctgatagtctggctaatttggttaccaacatggctgtgtcgaagtgtgccaacgcacatgacgcatacttggagtgcaccaattatgccgtcacacaattgaacttggccaatgttgccatgtatcttgacgctggtaagcatctttcctcggtcctggaaggcgacaatccccttgcgacaagtaaaacagcgagaattatctttatttctgtttagccaaccgctcagttatgtcattttatgtggcgtcatgagaataatgcagccatctctcatctgtatatgcttactattaacataggacacgcgggatggcttggctggcctgctaatctgagcccagcagctgagctcttcgccaacgtctacaacactgccaataaacctgcagctctgcgcggacttgccaccaacgttgccaattacaatgcctggtctctctctacatgcccatcatacacctctggcgatgccaactgcgatgaaaagaaatacgtcaatgcccttgcgcccctgcttaagaatggaggttgggaagcccacttcatcactgacaccggtatgtaatcaagaaactttaaaacagcatcagatcaatcaccttcttctatgggtcaaagatctcacgctgaatgttttggtacaggccgcaatggagtccagcccacccagcaaaatgcatggggtgattggtgcaatgtcaagggaaccggattcggtgttcgaccaaccacggagacaggtgatgccttgaccgatgcctttgtttgggtgaagcccggtggtgagagcgatggtacttcggattccagctcggctcgctatgatgcccactgtgggtatagcgatgctcttcagcctgctcctgaagctggcacgtggttccaggtaagagtgccccgattgaaagtgattatttctacaacactgacgacttcgcaggcatacttcgcccagcttgtagagaatgctaacccgtctctttaagtctttggaatcggcaaatataggttccagggctagcagctacccaggcagcgaatgctgtgctttgtgctgattctctgtgttcccatttgatagtacctctgccgggaggcttagaccaataagcagatgaccaaatgctcataagattctggatgatctcgaggctattcccaagatctattgtttgccagcatgtggagtagatgactatatattcgactatccattcattgatgaagatgccatttatagacaacgtcgataccgccttcacagttaggtgtgcacgtgcacgggtagatcaattgccaaaaggcggtctgaatatcaagcagtatcctgaccgcccggtaggcgaagagcatcgataacgaattgcgggatatcttgtccactaccacttccacaacttcaacttgcgccaatcctttgacagagcctcttgttgttcttgatatcatcagtgaatataagcccatctgcattcctcagctgtgcagctttgggtgcttcagtgccccgggcgtaatcaccccacaccaacactctgagagacaaagagcgagagtgcacaccctgtcatggaggacttcaatagtgaaactgatagtgattacaccagctattggcgagactgggtaagtgaatttcttttcatcgcaatctgatttcccttgagaagtgaggcgttacggctggcgacagggccaccgtgggttggaatcgaatggagcacagcgaggggctgccgtgacccggacaaatatcgagcttcgtagcgtgttgctgcgacgattgtgacttgacgatatcgtgtctgtcgtcctggcgatatgaatacagcctgccgcgacacaaataccatgttctcctctccaatctcttctccttctcacatttgcatcctgttcggctcttatttttgctttactggatttccacttcatcatggtgtcttggctgtctccacaagttgtccttttcttcgtggtcttcttgggcggcgcagcatctgcgctgttccaacgcgcgtcttggtacgcggaccatggcgatatggattcttgtttcttgtgtgtatcgttcgcgatcacttcggtctacttttacgtccatttgctctgcatttacgtccagatatcattggaagttgatctagccaggtttgatccaaatgaccccaatggtccccgcggctctcctggctcggattttaaccccggtggacaaaataaaccacccagtggccagtcaccccaaccttcacggcgtggccctgcgcgtggagggtcttccacgtcctcgcgtttctccgattcccctctgtctagttacagaagccgtgcagtcttattcatgattatgctaatcgcaatcatgtatttgcagtttgtctcatcccgtggtaacgaatacttctgcgagattgacgaggactacctaaccgatcggttcaacctcaccggtttgaacaccgaagttccgtactatcagtacgcccttgatcttgtgaccgacgttttcgatcttgatgccgacgacgatctgcgtgagcaaattgaaaagtctgcccgtcacctctatggcttggttcatgcccggtacattgttaccactcgtggtcttgccaaaatggtatgttgaaattcggaacttgtgtgcatgttgtttcccagacgaaagtactaacctccgtgcagcttgaaaagtacaagaagagcgacttcggaaagtgcccacgcgtgatgtgtgatgggcatgctttgcttcctcttggcgagtccgatcttccgaatgccagcaccgtcaagctgtactgccccaagtgcgaagacatctacaacccgaagtcgtcacgtcactcgtccatcgatggtgcgtacttcggtacctcgttccactccattcttttccaggtctatccggccctcaatcccgagaagagcagccgtcgttatgaaccccggatctacggcttcaaggtgcacgccgcagctgcacttgctcgataccaagacaaccagcgtgaggatctcaagtggcgtctcgccgaggtcgatatcaaccacaggttcatcgaggatagcgagagtgatgacgatgcattcgagtacgacgaagattatgttgaaggccacgtggagcaagtcaagaacgacaagctcttcggtgatgcagcttcgctcgcatgaatgtcgccaagtactcttgagtgacatggattccattcccatatttcacgggcaacatttcggcgcaacgagggatacgtggtatgcttgtgcttttcttcgggtgttttcacgaatgacggcgttcggtagatcgcaaggataatttgcgatggttttttttttctccgacttcgtttgtacctatcacctatctagtccattcgggactcaattgaaaccacatgactcaattgaaaccacataacttttatcagatctcttgcaatggagatggttgctaggtttatatggccgggatactaagagataataagtacacgtatattattccgggtactatttgcagccgccgcttagaatgttgaacgattgggtacttcctcagaactacagagccagtcccatttcatgcaattgttcgaatgcaaacgtcaccgcgcgagccagttgctcgccgttctcccatgcctcatcatgagcaccggtgatcgataagatgcgaacccgtctatcacaatttgaagcttcctgcacgggtatctgtgcctctgccttctcccagttcctcaaggtcttctccatgacctctatctgaggcgcgtccaccaacccatcgtccttagaatacgccaggacaaccaaccttccagaattccacccgccttccactccccgagagccagtcaccttcgccggcgatacttcatcccagagcatctcatccgccccaaaggccccctcaataaactcctggtatgccgagatgtcagcatgcgtatcccgcagcagtcgcaggtcgtagatacccgccacactgacgatggcagtgggttgcactggtgctgtagttggcagggaaccggaagggccaggtatagcgacggtctgttcccgatgaccagaaaccgtgcccatcacagcttggaaggccagcgttgcgccgcaactgtggccaaccaggatgtatcgcgtaccgaacccgtatgtattctggaggaatgagagcgctgcctctacatcggtgatgtggtcagggtgtttcgcattctggaaatccttcggggcggtatttgagtcttgtgggtgatttgggtgagcgctgagtcggtacgagatcgaggcgaatccggcaatgggtagatctctttcgcgaagtatagattccgctgcactgaaagaggttgatgtaaccgctggatcccgccaggcaccaccgtggatgaagctatagaagtacaccaaacgttagtattgctttcggataggactgtgatggggacccgtgtacatcacccagtagccatctttgcgtggagctaatgttgtgacggcaatactttgtagattatggtcttggccatagacaatagtctgtgtttttgagtgatccgacatgttgccttgcggagttctacaacatctcttgatttatggggaagtgggacatgtcgatagattacgggcaggctaggagctgttgccatttgactgacatgttggaggtaaaaattagcttcgtcttccaatatccgtcacaatgtcctttaagtcactttgttcgttcttcttcccgtctcatgtattgtttaagacctctggtcgaatgagaattccccgatgagtccatggtggtgtaatattactgtattgcccctccatctacttagtggaaatctgtaacatatttcgttgtgtattggtatcacgctaagcccaatcaggaattaatggtccctttcacacaaaccctccaagtccaccgtctcgaccttaacaaccgcccaactgttgcaatctttcacaatggccgagtgagtgatggtcttttttgatcagcaagaacatgatgctgaccgacttgcagaattccagtccccctcgcggccgttcaggtcgaggccttggtatggtctccccgacgaaaatctcccccagtcctcgccagccagaaatactgacgtcgggtattccaggtggtgatgaaaatcatcaagcactgctcccagaccttcccctccactgcaaccggcgcaatcgtcggtatggatgtcgatggcaccctcgagatcaccaacactttcccattccccgtcgtcgaagttcccgccgagtcgcactttgacaacgccgctcccaaccccgccgctgccgctcctcgtgctaaggcaaacgccgcgtactccgcagagatgattcgcatgctgcgcgaggtcaacactgatgccaacagcgtcggatggtacaccagcgccaacatgggcaacttcgtcaacatgaacgtgatcgagaaccaattttactaccagagccagctgaatgagcgcacagtcgcactggttcacgatgtcagccgcagcgcccagggcagcctcagcctccgtgccttccgcctgtcgtccaagttcatgactgcgttcaaggagaacaagttcacctccgaggagtacgtgcaatgacctagtcgatttataagattatatgagcgacatgaatattgacagaattgcagcctccaaaagtccaacttgcgccaccccgacatcttcgaggaactgcccgtcaagctccacaactcccacctgatcactgctttcattcaccagttgcagtgcccgatttccacagcttccactgagctcccttcctccctggctgcccttgagtccagccccttcagcaaaaactccacccttacccccaacctcgacaacctgtccctcagcatcgatcccttcctggagaagaactgcgatctcctcctggacagcatcgagacccacaacaccgaggtcaacaactaccaatactaccagcgtgtgctcggccgcgagcagcaaaagatcaacgcctggaaggcgaagcgcgcacaagagaatgccagccgtgccactctcaaccagcccctcctccccgaggacgagtggcaacgtctgttcaagctccccgccgaacccagccgtctggagagcatgctcaacacccgccaggtggaacagtacgcgcgccaggtcgacagcttcgtctcgtccagcacgggcaagatgtttgccatcaagggcaacctgctgcccaacgaaacctcgaactaaacgttgatgattgcgaaggggagacacgacgcttctggtattgcatgacctttttacggcgtagggagggaaaatgttctctattttggatgttaatatgacttcctgtttcttttttcttctatgagcggagctgagtctctgggaattatactcctgctttgtatcgacttgtattcgatcatagaaggaaatcttattttgtttagaatataacaaacacattgaacaggtcaatttctcatgtaccttttttttatttcaaaaatagcataatctgtggatggaacaaagtgatctaagacaaatataaggttagattaatctatgaaatcgtatatctatgaatactcacatgcatgcatgcatcataactaccatgtgtctggatgactccagggattttgaatttccaagggaactgcagcctcaagctcgtcggcgactctgagtacacagacgggactaatatttcccaacagggtggcaatcgcagtgtagaaaataggctgaagagcacagcaagtccgatggaagagagtgtcaccaacaatatccgaagcctcgatgcagccaggcgtcatcagagaaagctctctaagcttctcagccacctgaaagcgaagaccgggcttagatcgaagctgcatgatctgggcatgtaaaaggtcgaggaagtagctccggtccttacagtagatactgtcgggagcagggatatccatggtgaagggtcgatgggagtgatagagggggagtatggatatgtgggatccgtgaagattgtgttggagacactgttgcttggtgacagaatttcgaggtgggatggaagctatttatacagttcgaatagttgacttcaaatactcgatgaagcacagctcgaaagatgagaacaatatgaatgtaaaagatcctttgtttacatcttctcttagttctcggatcaacttgcacacgaaggccattgtactcaagaagggactagacaaagcaaaaagacattggcttttacaaatatgaagaatactaggcattgagtaatttattctcatcaggaatcataatatacagaggcttgtcatatagttgagcaaggctattgacacttcgaaggatgacatgatgttacttgatttgatgttacttaatatactatgtacacatgtgaaaatacaacggcctggtacctttccatccctgactagcgatgtgtcgattaatatttattctgttcctttcgccgatcgtatgtctcgactaccatgcttccccagtgagcttcaatggaaggtgaagcaaccgataaccgaaattcgttggcgaaggaagtcgtcccgctcgaatgttaatctgcaaagattggtgaagcagcctgggtgctgccagtcctgcatcacgttcctttcgcaaagtcacaaactcttcttcgctgataccatctttcagatgtttattcagcttcttgtgatcctgtacactcacccaaggaacggggtcactgcgtccctctggtggataatcatgacctgtccagatcttgaagtggtcagggaggcttagaagcttgcggcccgaacgaaagaggtcgttggcatcgccgccggggaagtcacagcgtgcagtgccgatgtccacatggaaaagagaatcaccgcagaatagattatctggtaaatcttgttagtaattgtttaacgaggtcattattgttggttgataatcacctccaaccatgtaaccaagatgatccggtgtgtggccaggtaaatgaatagcctttcctctcaggttcccaatagtgaaggtctcatcgtcgtcgaaaagtacgtcaaaaatgccttcatattccactggtggaacgccatatctttcggcaaacaatctttgtactttttcaatacgcttaccaatgcaaatgggcggcttaagattttgatcctgggcaagacgtttttgaaggtaagatgatgcagtcaaatgatccgcatgagcgtgcgtttcgagaatcttatcgatcgtatagccctttcccttgataagagaaagcagggaatcggctgcgtgagtagtcacggcctgagtagcagggtcatagttcaggactgggtcgatgatgacggctgttgatgttgagggatcggcgatgagatactgccatgttccagatgtgggttcaaagacatcatgaatcacaggctcggtatatatagtggatgcagtgctgtatgtgacttggcgtgggattagatgtttggtcggggtagagaaggaacgaggcgagaatgggcggttccagctatgaaccgtctgccctttttgtgattgacgcactgtccccttgattgaagcgacgtttctcgaagattttgcggtatgagatacacttgtccgtgtcgctttttggatatgacgcaattgtctcaagttggccagcattgaagttccaattggcctgctagacaatctgaaaaggtctgacgaccattgccagccgatgcttgatgattgctgcttgaagcttatcatgatattccggatttgaagaacaaaatgtggtgaggaatgtcagagctgtcgcggtggtcatacttgaaaggcgtgggtcggcgactcggcgagcatatgggtcgccgattgaaagagtcatcacaactccatgttcaaggtttcttgcacggactatcgaattcgaggaacatatgatgttgttagcgaagtagattgatttaaatactgttgctaacgcttcaatcccatatgttaaggcgaatcaaagtctataagaatcgaatccgtatgcacgaccgcagtcataaagtgagagatagagagatactgagacacttcagagtccaagaaggacattgaaacatatctgaagtaaacaaacatcattgtaactactccgtaactacggagtactttctttcacctatgggaaccccgaaagtattcggcgaagaaaggccgaaactccccgatatcggaacgagttaatccgaaaatcacgacatcataagatcagctgttttaactacttcagggctttttttttgtcacattttgagccttacattccaagatgtttcagcgtcgcacagtgcttgctgccaagcgctctgtcgctcaatggaggagtctcgcaaccgcgtctcccgtgagctctgcgcgaaaccacaaaattgtagtggtcggcggtggttctgctggtctcaccatcagtcaccagctgctgcactctggcaaatttgcacaagatgatattgctgtgattgatccagccacatggcacaactaccaacccggctggacactggttggcggtggcctcaaggacaaagaggagctacgtaagccattgaaaagcttgattgatcctaagttcaagttttataacaatggtgttggctcctttgcccccgctgaaaactcgctcactctcgagaatggtgacaagatcaactacgagcaactggttgtggtgcccggtattagcatcaactatggtgctatcaagggtctccctgaggctcttgcagaccggaactcaaccgtttccacaatctacagctacgacacatgcgacaaggttttccgcaccatcgaaaacttccgcgaaggcaatgctatcttcactcagccagccggtgtgatcaagtgtgcgggcgctccgcagaagatcatgtggcttgctttggaccactggaaacgagctggcctctacaaccctaccagcccctctgaatcacccatcaagatcagctttgccaccggcctacccgtgatgttcggtgtgcccaagtacagcgccgtcctcgagcagatgcggaaggaccgtggtgttgagggattgttccagcacgatctcgttgccattgatggcaagtctgccgtttttgcttctcctgagggagaggtcaccagaccattcgacctgttgcacgtttcccccaaaatgggtgcttacgccttcgtcaagaacagccctctggccaacgaggccggatatgtcgacgtggacgataacaccacccgccacaagaaattccccaatgtctggtctgctggtgatgcttccagtttgcctacatccaagaccgcggcagcagtcacttctgaagcccctgttctcgttcgcaaccttttgcaaagcatggagggcaaggaactcgatgcttcttacgatggatacacctcgtgcccgctcttgactgagtatggcaaggtccttctcgctgagttcaagtacggtggagtacccaaggagacattcggaaactggtttggtatcgaccaggctgagccccgtcgttcgttctggtatctgaagaaggacttcttcccttgggtgtacttcaactacatggtcaagggtaactggggtggaccgaagggctggctataggccgtgtacattatccctatgttgcaatacgatggcagtacctcggggttttttaatcattaggggttgtacaaaagaaaaatgaaatcattgagcaaaatatctcgacagtcctaagtgcgttcagtctaatacaaagttaacttgggtggatatgcacgtgaccatatcaccaatgacatcatagctcatcataggtcgttatcgataactcgttatcgatcagcgagtgaatctttagtggaattcttgtcttgaattacattcttctctttcgaaatttaagtcttcgacatgtctctaggatagaaatctgacctctgttgctctgcatctctccatgtacaacactcattccgatatttgggtcgtgagtctcacccgatcaaagcatctccagtatactttcctattctcaccactaactggtcatattcctcaataggcaggcgcatttgccgcactcatagtcgattttatcgcctaccccttcgacacactcaagacccgtgtccaatccccagactatgagaaggtcttcaagaatgcgcgcacaggagcagtgcggcgcaatgtactcttccgaggattataccaaggtgtttggagtgtggtcttcacaacaattccagcttgtatgtgttggctcttgttgatgaacagggaactaggaatatcaccactaacgatcctatcaacgacaatctagctggcgcattctttaccacatacgaagctgtgaagagcattatgtacaattcctcaaaagaagcatccacgagcatgaacggtggcaagagaagctcacccgatggctctttgaacagtcttcgcttgcccttcacacattccctccctactccaattatgaatgcaattgcctcttcggccggcgagatggtatcatgcctcattatcacgcccgcggaggtactgaaacaaaacgcacagatggttcaaggctcccatgcggacaaatccgccatgcgacaagtaatctggcgattccaacatcatccttggcgcctatggagtgggtatacggcactgcttgctcggaacctcccaaacacagctttacaatttccactctttgagtatgtacgatcacacctgattaaccgacgaagacgattgaaagcgactcggatgaacactggtcaaccaccatcggaaatcaaggatcaactagtcgaacgggccggcttgacgggtatagctgcggcaatttcaggcacgatcgcggcgacagttactactccaattgacgttatcaagactcgactgatgctttcggcaagtgatgctgctagttcccaacataaaagtactcaggctggtactcggggcaatgaggcgatatcttcggatgtgcggaaaaaaactaaacctggcaagactctcatttctgtcggtcgtgatatcatacgatatgagggtgtccgtggtttgttcaagggcggactgatacgggctggttggacggcgattgcactaggcctttatctcagcctgtatgaaggagcccggttttatctagagaatcgacggaaggagcgcgagcatgtcagttagagacttggaaagcaagctggtggcggggatgaagggatctagtgagaagagcggtgttaaagcctttcgtttcgctgccgtctcagtgagaatattcatggctactcgactcgcaaatttccatcaacgaccctagaagcccgggcttggaaaaggatatttctttgttttctaaggttctgatgtgtccctttgattccattttgaagacaaagaacaaagacgggacctcaactttgtgaagcacattgtatttagtctcccgagactgttctggataaagaacaaaggtaacaagagcagaaggggtgtctttgagttcaggtagaatagtgtgaccaaggcttcaattatataaatcatattcccaccttgcacgtaatcgtaggtccatcccctactagtgtgtttcgattcatctattcaatccatttaagcgattacaagatcgatcatgccaattccatctggacatcaaggtctggacatccctatgattaccgacgaagactgggatgcagatgacgaggactctggttcagatactacttccgatagctttgacttggtgccgatgtcgacggcactgaaaccagaagataaagtccgaggcttatgtaccaacccattgtttcatttcacggtccaccgtgaagaacatacgtttccaggccagtgcggtaaatctgatggctggattaacacatctcattttctctggaccatgtgcgctacactcgcggattcaggaaccgatccggaatgggcagcgacattcgaagaatggcgaccccagtggaacaaaatccaggcgcaggtgaagagattcggatacactcacttttcttctgagatcgctcctgcaccggttgatcttgtgttggtccaattctttggatgggggtatagtggagaacccagagagtttgagattgaacaggaggacccagatagtgtctatgactgccaggatatgtggaccttttggcgatacattattgagacgccggcaagtcagattcgacagattgttgtttgcctcaaagatactgcgaggcttgttggctctgagtaaaatgtccgtaagatactttgagaatctgcacatgtgagggataatccttgccgttgagtcaaatttgtttttaatacttgctcataacccacccctcttccttaaatttcagtaccgccttcctgatcttagtaccactcagaattctgccatgccatgtattctgcctacttctggtttatatagtaaaaagacatgcatttcgattagaaaaatcgtatattctacttgatacctatagagttaaaccccttgctggataagcagttaataaagcagtttatgataaagcagttgacgatgaagcagttgatataggatatgacagaagtgacttattttttttagttgcttacatacaaaccataggtacctgctgtcttgctactatcatatgccgtttggaataaaagcggtaactatacaaattagggcgcggtactccgtaagaagcaagtgtcgaggcaggtgctcaaccaaattaggaaggcggtactgaaaattcaggcaagggggcgtgtgagcatctaagggggtatgagcaacaattccctattagtatctcaccaaattacgatattctcacgtaagaagtatacgagtgatctcgacggccgcaggtcggcgagatagtcgttgcgtacgtaagactctctggtttatacttgctacgcctcgctccgcaattatctgatgcctagtcacatacatgttccatgtgcttatttatgactatgtgtaccggattctccctggtggtgggggtttcctattcgggctgccgccgctttatgagagcgctcagactcaggctctcagagtagatatcatcatatgctatatgtttgcttgcttgcttgctagttggttaacgtaattcccggccaagctgcgcagcccaagacacatagtaaaagcgataaataacaacatgatatttcaacaacggttgtctacatgagcttttccttctagtctaatgctttttatatgacatcttgctacttattgggtttaggaggatttgataaattaatgactgagatatatatatttcaagggttcagcgacatagttttcgataccataatgatataagttctcgatttattcataactgggatatgatactaaaaatgcttatcaattgctatcggcatataatggaaatgaataagagcgttggttgttgagatatcatgttgtaatttgtcgcttttactatgtctcactcggccgggaattacatttaactcacatggccgcttaatcattctgttcataccgccttcctattcaatacttaagggctttaggaagcctcacgtgtacatacgccttccttcgccgaaagaaatgcccaacctagagaacctactggaaattatgtttacgatcgcaaatgaattgaagaagacccgagacattaactcattggttcgagcaagccgttatgtgttacaatctgactgcactcctgtatcgcactgaaacgttcggtcattctgaagtaaagcaggccttgcttgaaagcgctcagattggtttgggttctctgaagccggtcccggaagggtggcaatacatccagaggatttatcggaccatcccacccaaccttcccaaagtctccacttcacacctgagctctagtaagatgtggagatcataagttcaattaagaaacccatgaatgtatgaatgtatgaatgtcttgaaagtctcaacactatgtagaaaagtcaaaggttcttgaagagatcgactaccagatgttctgccatgatgcagtgtaaacaaatgcaactgatacaaccaacaaccacgaccatcatgcacgcactccatagcatattagttgagccagttatccctgctgctaagagtttttgtgacacagaggtgtcaaaaccgaatttattatctctcatacacccttccagggaccagggtcgattgcgtatcttctacgttaaatgttcgttcctttcgttcgcttcacctatgtttccgtgcgtgctgcactgacttcctgtatccagcatattctggtacatgggcttgaacatgccagattctttgttgccagtaatccttctatcccatgaaagccctacttctgaagagaaaatcccggtcaatggaaatgtgtctagatacgatatcctccttgtagcattccacaagccttataacgatagaaagacactcgctacggctagcaccgtaaattgagaccgggaatgatatgcaaaatcccctcccctggtgtatgggctcagagtcgactgtgaactcgccgatttggagacgttcaactgtaagattcatcaactcgtcatcggaacagtggcggtccctgttacaaaatctcaccgtaaaccacaaggtgcctcggaacaagccatactcatcgatagtaggaaagccttcacggagaaagacggttcgagtggaatgcatgttatggtcctttgacagtaaccccagacttggaaatggctaaccacaggagtaaatattctgccagttttgctagataggtgtttgagcagccggaggaaaaggtaggatttctttttgttctgctaagtctttcatcgtctagccttttattttgggatgtgaaggctttgttattgtatccttccatcaaaagctcaaggcgagaaaataggttcagagacctgaaagtcaggcactacaacaaaggaaggatatagactttgttctcattccattcaagcacaccataagccagactatataaggtcccaatttaccttctttttaggaatattccatttttccagtccaccggagactttcaaactaccaattttcactgcggatattatccaccaccaacatggttgaaccaaaaaaaaccatccgatctagaaaatcccctgttgaacgacctaataatgggttcaccactgagcgctcagttggcggcgagcgtcgttccatccgccactaccacgatggtcgactatcgcaacgtgagagtcctgtccctggccctgtccaaacactaatcaagaccaatattatgtcgaagacaaaaagcactagacctttttccaagctcaaggaacaggaaccggaaccggagccaaaactagagccagaaacggaatatgaatctcctactctcgccgagattgagagactctccggtgctgttgctacactcttccacccagaccgttctaacccctctgagaatcctcccccgaggacaatgagcccacagtcatggagctccgagagctcatatggcatggttactccacccttccctgtagcctcccctactcctggagattcacccgaactcatgagcacagatgtgcttctccctccagcgactgctaggtctgatggctcagacgatgatgccgacagtatttcaaagcagtggaagaaactgggtggaaagaaacgcattggaagttcagatattcacgactaactggatgtttaccaagaaagattttcttctggcgacgtattatacatgtaggaaagtacaacgtagacatgtagataggtacatggcgggacccagaggactagactaccatcgtacgccattagtaccacagtggagagccaaacttgctccagaatgaagttgaaacattgaaaattgattgccatatccaaattaaagaatgccaaggataataattggcaaagtgagcaactcgatcactatctggacaaaacacttcttcagatgaagttcaatcagccataaaaactgaggaacgccaaaagacttcaatgaattgctaaatgcagcaagtcctgaagggattctgcgtcctccaagtatctctgcaatagttgatccacgtttctttgtcggagaaggaatgattgtctccaagttcatcggtagaaggctagcttcggtcattatgagagtgatagatgctggcagtagtcctagcaaacggaatgcaagcatgatgatcactgcaaaaacctcgacactagcgcgcctgctcgtggagattggcatttcctcgccggaagaaatcattgacctctggattagactctgggcttcgtacatcaaggcttggcaaatcccatatgtgaaactagggactgccaagtgtatccatttcctttggacttcatcttctgtcaaagagaagagtcgaagtcgatgtgctgagatagtagcacaagtccagatcaaatgaagtttgcacagcagaacagaggaacaggcgtatgcaaatggtatcagtaattcgtgtcttagaattgcgaattccaagaaagatctgatcgcataatgagtgacctgatagacaaggcctagcacaagcgcataggagaatgtgtgaaggctctgtgtagtatatatgagatgtatggccttgtaaatggatcggaaggtcggaggtcgcttgttccccctttcttgatctgacaaagccccatccgctcgagcaatctcaacgatcaaagatgtcgctactacatggccaagaagataacgaaccttgttaaagatcgattagaataaattatagggaagatggccagacgaggaacttaccaagccggaaagcaaaagccggctagaaatgagaccaaaagaagaaaatgtgagctctttgtgtatggtcgtagaaagggaaatttggtcaagcagatttccatctcctcctggactgatcagaatgttcaagacccgcgaaggtaaacttgcaaatacggcctgactcaaagtgagaaacattccaaatcgtaattgatgggaaattgttgcagcgaggagattcaccgaaggcagggtcgcactacactctgacgataataaatttagaaagaaagaatggggaaaagatagaattgggctaagccaacgttcatcggttatactcgcacggtttaaagtcctggtcgatgtgttactgtttgcattgtttacaccatttgcactgtttgtactccatcaacactcccatcctaatgcctttccttttttctcttcctcgacacttaaattctttatgaaatgcgctctttcctctgaggatctggcagataacagctgagggtaatctttcactcaatctgactaatcgttcaagtcagtttcttcctcaagcttacataggggtcaggttccgaaccctgaccggataaacctcgggattatttatgttgtccaataacaatcgccgtccctcaccaaaagaagccctgccaagaaacccatgtaagcagctaagcattatttaggtacagagcggtgctgcctgatgtgacctcggaatgtctagcaaatcccgacaacccggtctgtcgagagtgactccacaggactgtcaattgaagatcaatcaccaatttaggccgaaatacagagagagcattgcccaagcctggagtacctgcttacatgtaagattcttcgaatccttccaacctcgagtttgtagaagttcgtcagcttactgggggcctctatttcgagaatagctctcccaaaactctgactacccagagatccatggacacgatcattcgatcacgcggcatgccaaacttgaacgttactaaacaaacactgccgaaaatctataacgcactttaatcatgcatacatgccctgaggattgggcaaaacagtggtaatatagcataggatgaattctatgcattcagggggcggcgatactagtcgcactaaatcaccctagtcaggaataaaatgaattctgacattaagagcactagggctgacagctccgcatgacgaagtaacattcctatggggaccgaatgtccacaagtgctaatcagcataagctcaacggaaaaggctcatacgatctccgtttctgctcgtatcgaggccggagaggccacatataaaaggctcattgtacgcccacatagagcttcacaaagaagaagacgagaacatcctgtccttgatcaatcaatcaattctctgcgccgttcttcccatccaaattccttctcctacaacacgattcggtatcctcgtcccaaaacaatgttcaagaggctttccatctctgcctgggccattgcggttctagccactaccgcgcaatgccagcaactcagctatgaagatagcattgccgctctagcgtacggaaacgtggccaccgatacctcttccgcgggcgaagtctggctcaacgtgactgggtttgctgtggaggagcttccacacattcagagcgatgtgggaattcacacattggacaacctcgagacactcactgctattgctggccttgcacaagacgcggcgaagagaggtcagtggggagacattgtctacttgcatagtgctttcagcatgaatggccacgtcgatcatctcaatgtttcgagtgtcgagatgcaggagtcactcctggaggctgttacaaaccggaccagcggaaaaatcgactcccctttggtcgagctttatgccaatacctcgagctcgacattcttggctgaagcttttaagaatctcaaatcagacgcaaatccccaaagaaaacgctggactaaagaagcttgttcaactgcccaccgcgctgtcacgagcgcctgtcgaagcctccttggaaatatcaacggcaatgccacatggaagtcaggcggtcctcggaatatctgccaatatggttgctgcatcagttggagtgcgaacgccactttccagctccagaatctctcaagtgctggaaactattgcgtgaacgcgtgtgcttcgagcacagtcagttgtgagatatatggtgtcacattgcaaggaactgtcgtggatcaatgtttgagtaacagagcaaacggttgcacgtaatgagggaaccaccatgacctcattcgaagcagatctgcccgaagacgggattttcctatggtctattctcaagggttgaattcaatgactgagtttcttgttggtttcttttcttttgcggcatttacttgtgatgcattctgacgtgctcactgtcgccccatgcagtttgtagacctctctgtgtggcattcctttccctttctctttctattctctggcagacagctcaccggcaaacgcgcagcttgccgcgtccgcgctttcctttatatgtctgcagagatacttcttctgtgttcttgtggatggaatctggctggctttgtggtacgaaactatgtaaatagacttcaatacagtagctagtttctgatcctccatgaatatcatctttttgcctctggctgattattacttcccttgtagtcaggacctttcatcattatcttctgcggtattcacttgtgtatgtagtatctcatccattgaaattaatatcgctccggcaacttcatgaagccgctcgggtctttctcatcacatacacccctccacagagtaacttatatttattttcaaggctccctaaagggcctcacctaaaaagtatttatctaagcaaactaaaatcctttctgcctgaaaaacagtgcagttacatgactaagcgagctaagtgtcccccgcaggtagattttcattatgttcgtgatttaatgggatcttatctggacgatcttcactatttccccttccctgtattgtctttattatctctattcgaacagtactgtgggggcgtcaatggcggcccgggcgatcatgctatgatcgaggaggcagtgcgactcaagcataccaactcttttaaaaactgttacactatgtttcaaggcgacatgtatgccacatcttactaactcatggctaaagaggctctggctatttttgaacccgcaatccaagctcgtatctgtgttccacagtcagtcggagaatttattatccaaaggcagatctacaccttgcaaaccctcaatattctcattgacgatattctgagcggctcgcaaacacgaattcaaaaggccccaccaaagaagaagaaggctactgatgacggagcgacagtggctatgtcgaggctcagtatcaagggcccccaaacgcggcttaggctttccgacctggtcgccagggctcgtgatcaccaagacacacttgaagagtactgggtttgctacccactgagcctgttgtgcttgctcatgctgtcaatatttggttctttagccgcccagaactcgttcccgacgaaaagggacggcgattgccggttcacactgataaatacatcagtgctgctgttcttgaggctatcaacagttcgatccaaggagccgccatctggaaatacattgctagtattcttggggtgcttgacaagtgtgttggggatgatgcctctcgagttgttctcctccaggagatctccaacatatgtcaagtagagttaaatcgtgcgcaaactctgttcaagcgacatgttcagagtgcaagcggctctaagtggttcaagcgaactgccaatgtgtatgacagcaccggtagcccgcgcgtttctataaaaggcaatctggaagaccttaccgtatctgacccccagctccatcacatgttgcgtctctgccagccaaagctcaatgtttccaccgccactacctggatcaaaaaactgggcgagtatcaagaagcccatcctagggagagggaaaatctggaagatagagaggctgactcattgggtgacctggctatcatcattgaatttatccaggacttgtcctctgtgcttccaattccttccttttccaacaaaaagggccagatgtttgccgctaagtcacaggtggtggaatcttaattaaaccagaccaaggatcaactcgacttgctcgattacgtcgttcccatcgataacctcctagaaccgggagtggccagtgaagctttgaaaaagctagaccaattcatcatcgaaaaatccgggacaacattaggattcttgtactaagacatggttgccgactgcctgtctggcgttcaggctcaatgccttgaagccaaagaaaaagtggcgcagggctagaaggctgaatttccttctgatccggcaacgaccgcagagtcgacggcattccgagtcgaacagcggaaacagaaagaaaagacgcgtcccgcacatttatccatctacgacattgttacgcctgtgaagccgtcttgtccacaggagccagcttcgctgctgcaaaccttcaagatagacgattcgacagcagaggtcttctcgagactgttcagcaaatctcaagcacgtggcccagccgcctgggcggccttcgccgaggcgatggctaaattgggattctcaatctctcccaaatacggctctgtttacactttctatccacccgacagcatgacggcgaagaagtcattcacagtgcacagaacccaccagtcgaaaatcgaaggatatcgggttctcacggtggctcggcggttgaggactttctatgggtggggtgaagagacattccgagtcaaatgagttaatgacttcagctcttctcagagggatttattacgatactactacgatgtttcaatctctctttgaagacgtcttttgaaacgtcttttgaaagtcttttaggaaacttgaatactacgaaaggcacaattgccataaatccgctttttgatccaattaatgcatccatgttaggtccctaatggttgctatgtatgcaagttgaactatggccataactaggctacaggcataagtaggacgataaaacgctgtcccttgctatttcacaaccattcaatctcccatgttggcaagctagaagccaggctcagccagaatattcataatgatgaaatgaacacacatgtcgcacttagggttgataccaagtctcaaggccagctgtggcatccttatccggagcaaattgcagattttgggaacatcaaacttgtaaaaatagtcaattgcagtgatgcgattatggccattttcgtcacaagccgtggcaagggaagcttgtgtgagtcgaccgacgtactcaatgccttgttcacgcaggctcactttgacatctgcaatggtatctgacttcggctgcagtctgataaggcgagcttggtcttcgagccatgacaggaagttggttcgctccgtctgatagtcggagatgggactagacgcggacattctgagtctggatgaacccgagacttgtcgaggcgtgtgcagcttagcaggcttcgtggctgattttgaggaatggaaggttcatgaggtgcgtgggtgatagaacaggcttggagcttgagttggttagccatggtgtatgggatgcaatagaaggtccatgatactttgataaggtagagatatttagagttatccagctgggaggaggatggtgagaacaacgcatggttttataccttgcgatcattggagaatgaatggcattgaggttgtccacttcaaatcctattgagaaagagaagaatagcaacgaggccattgatgccgcctttaggatcaggccacactcttcacttctcagaatcggatttattcgatgaggtttacttctttcatctgtgtagcctatgttatacctaagcttgtttaaatgcatttcatccctcatgatatatagaaaaggactcttacagtctagacttttatatataaccttcgcataccgtacataccaatttctattcggtgctattgttcatttctttcagttataccaggagaggtcattcaagttgcacatccattcgctacggactacctggttggcgaacatagagcgtcatattatcataaagattttattgtagccaatgaaaccattcataacagagaattaacgcgtatattgctgggtcataatatcatacgaactcatacatgtcatcacatctgttctgtcggaatctcgtcgcagaccttgtaaataaccaaaaagacaaacataacgctgcaaccattatacaaaacgaaaacaaaactttcaatacacaatgatatataatgaccaaatcttggtttacaggttcgtcaatttgcggaaccaactggtgggcttcttagcatccgcactgggcggagcgggctttatctcacggtcacgttcgtgatcaccacttccagagctgctcttcacaccttcacgacgcgaattatgatgccgaggacgagcatcatcaatctcttcttcctcgtacttagcacggcggtgggccttgcggcgaagaacacgacgagcttcctcatctgatgaaagagaatgagaatgagcattgccaccttcatcgcctgcaagaggaggtagatcaataagagtagggactatctgcggtggctccggaggctcatcaccttgcgagtaaacccacgaggaaatcttgtctttcgcactcccgccacgattcaacgcaccagtcatgagcggctcgcgagttaactcaggggccaccttagacctgcgacgacgagcgttcgggtcttcatacgggcgagaggtacgggttcctcgacggtcgacctcacgctcatcaggaaagacctcaacagggatcctttgctcacgttcacgacgccggctcgttctcgcggcgatcatttcctcttcgcgcattcgccggcgctcgcggcgttctgcagccttagcttcggctgcagcttgggcttgggcttcacgagcagcctgctcttctcgagcacgacgttcctcgcgcgcagctcgtcgggcccgcttttcttctcgtaggcgatcttcttctttcagacgttcttcttcttcctcttcacgagcacgttgctcgcgcgctcgttcttttcgcctcgcgcgccgctcttctgcttcccgagcttcggtttcacgagagtcaggaggtaccttgcgggatccacgccgcgcatgtcgtgctgcgcgccgggcttccgcttcatcggcttctgtctcgacacccgctgctgcaccggcggcgtcgcccatgaacccttcggtatctggtcggacagatccgcggcgtcgatcttcgcgacgcgatcttcgagcgccgtcgcgctccatttctggcggatgtcttccgtcgtcatcacgatacgatcgcgacctgcgtctgtcgggcatctctggtcgttctggccgatctgggcgtgtgccttttctcagagaatcgaagagccccatgaatccaccgctctcttgtttcttcaccggagcggtgttcgagcgctttaggcgacgttcccttggaggagcatcgaaaaatgccatatcgtcggggcctgacataatatctgcggtgggatgtgcttgatatggatcaaccaggacaacatcgtcctcgtcaggtctgtgccgcggctatgaaaggcggtcagttggtacaacggcacaacaaatactgtgcttatcccgacatacctgtctccttgacctgcgccttgagcccttagagccttccttgggtgaattcctctcggcatcctccatgtcaaccacaacgaggtcatcgtcctcgatcgcatacggatctcgaactgtttcgtaggcagaaagtcagcaagaataaatgagttatgacgtaaatgaacatacctgatctccgcctgtccatgcgcgggcgctcacgtcgagacttgggaggatccatgcccatcagcctggctgctttgtcaaagacctcacgcttctcatctggacgtgctagatcggcagttctgtcatctagattaattgatggacgtctggatacgggtttcgacgaagaaccagatttgcgagtggatttgcttttggactggggtgtacccagtaccatattggccaaggtcacgccacgttggttcttcgaggaccgcccctcacggtctcgccgcttctccctgtcagacgcagacctttccacttctggttcggggtctttgggtcgaggttttccagtagactcttttctctttggaggttcttcctcttgaatctttgcttccttctgacttaacttctttggaggttctgcttcctcttgaatcttgttttccttcctcaacttcttcgggggttctgcttcctcctcctgtgtcgtgttttccttcttactcgacttctttgggggcggcgcagccccccaaaagccccatgatatggtgttcgtgttcttttcaccgcgtgctcggtccttcttagatgattttggaggctcttcagcaggctccggtggaggcgcggcagaaacatcttcatccttctcttctggctcgtcggctacgggctcgggctcaggctcaggctcaggctcaggctcaggctcaggctcaggctcaggctcaggctcaggctcaggctctggttctagcgcaggtattttttcaggaggtggggttggttccctagcagcggccgctgcggctgcggcggcagctttttctgcttctgcctttttatacttcttcagttcctttttcgacatttttgaaagatccggggccggtggctcaggttccggctcgggctcaaccactgtctctggctctggctcgggttcgggttcaggcctgggctcaggatcatctccaaagtctgggaagcttccagggatagagtccttagagactttcctttcttgagactcaagagcttctgctgtcttagactttgttcttgagcttttcttcgttgaagcacgctcctctataggaggttctggctccggttccggttcgaccttcttttctttggatttgctcttcgagctagccttttctgcctttgccttctccttcttggcgagctccagggctttgatacgttcagcaacactgagcttggaagccttaggcttcgatatcttttcgggttctggttcgggttcaggctcaggttcaggctcaggttcaggctcaggctcaggttcaggctcaggttcaggttcaggctctgggggattttctccaacgtcaataagaaggtcttcctcttcctctttcaccttaatcgtttcatctgccttcttcgttgttttgcttttgctgctagaacccccagtcagggtcgaccagaagccttgagaggctttttcctctttcggagcttcgatggcttttgtggttttctttgtgcccttggaggttttaggggctacttccgcccaaatgtcatcggcattgtcatggaaagcttcgggatctggggttaagccctgagcaggaggtgtcggcgcacgtgggggaggttcttcaatattactgcccttcttcttctttttcttgtcctttgctggcccccaaatcccccaggagctctcatcggcaggtttctctggttctggttcaggttctggttcaggttcaggttcaggttcaggttcaggttcaggctctggttcgggttcaggctcacgttcgggttcgggttcaggctcaggcaccggttcaggttcaacaactggttcggggacttcttcggggggcttgttcgatggaagctcgaagtccttgccgggaatgggcagtcccttacgtatcaatgttttttctcgcttcttgcgttctttagacgatatctcatgccaattttcgtatagagggttatcaggcacctttggcgcctcgggttcgggttcaggctctggttcaggttcgggctcgggctcgggctcaggttcaggttccggaatgggttctggctcaggtactggttcggctttgcctttgcttttctgcttgtccttcgatgtaactccccaagcggcaaagggatcaactggctcttctgctttcgccggtggttcatcgatgacaggcaccggatcagctaggaggtcaatcttcttcttcttcttcttatctttggttatcattgaaagaccccaaccccagccagtatctgcctcggctggttcctcgatttcctcggccaccggttcaggttcaggttcgggttcaggtacagccgcagctgctgctgccgctgccgctgccgctgcctcagcttccgcagcccttgctgcttcctgctctgctgtctcctttgctgcagcttcatcctcctctttccatttcttctccatctccttcttcgttttacgttgctctctctttggcagatttagaaaccatgcttccttcgtgaaatcgactctgggtgcaggagccggaggcgcaggcgcttcgggttcgggctcagtctccttcattttgtctttgctcgcatcccaacctcctccccaatcatctttttgcttggtttcaggcggtgcagatcctaagtcaaaatcaaactcgccagtctctgacgtcttcttctttggggttgctccccaggggttgctgtccttggattcgtcattgggaggagggtcaaccttgctagtagtccaggctttgccccatcctccgaaactaaacccagtccccccggtcttaggggctggactgtcgaaattcaagtccaattgcggtgccccgtcattcagacttatgtcttggaaccccccaggaggtgcaatctcgtcctgtaattttacttagacacccgtcttgtacattggagcagaatggtcttaccttccccttcttcttcttttttcctacattcgtgaaggcagcccacgagtcatcgcccccatcttcggcccagctaagatctttggcaacagaggcttcagaggcctttcgttcttcctcttccttggcttttctttcttcctcttcctcctctaatttcttcttcttatccttctttccgctcacattccaatcaccccaatcatcacccccatcacctccatcacctccatcgccgcctccagcgccgcctgaatctccaccagccccaccggcaccaccatcaccgttggatttgtcgtcgtctccaccagccccgcctgccggtggtggcggtggaggagaggaagtcggtggtggtgctgctttctttcctgttggctttttcttcttatgttcccgaatacccgtagtattcccaaaatcaattcgtacatccagcattcgatctttcggcagcgacgatgacggatcacgcgatttttcacgaggctttggcaggagggaaacaggcgtcgatctgcgctgcgcgagcggaggcagtgcagagtattcgggagggagatcatggattacatcgtcgtaggaaggtggaagctggtcgtaggacggtggttctggtgagcgagccgcaaagcgagaactcaatccggtgactaaatcttcttttccgggcacccagttatctggccggcaaaatcttgttttcttagtcgagaaagtagtccagacctcgcggaggagtttctcccccatttgcacatcccgtgcgtagtatgcgacatcctccgcggcgctagtcttccccgcacatacacgataagacccctcaattacttccatatcgaaaatcgcatgcgccgagctcacggtcggtccgatcacttatatggcaactcagcgacgtccaatagcgaacgcatcgatcgatgatttggattcaagtcctggtggcgggtattgtcccaatcgatcacggttttttggggcgcggagttgcgagagtgcggtattggtgtcgtaaggttgcgcgagggttctgtgagactgtgaggcaatatatcaagttaaatttcagtcaaatggcttccctggacgctcggcgcgtgtttaggtgctgttcgatgctgataagatgatgtatagacgggttaacagacggcgagagtctctaaaactgtgcctgctataaattgggcacaaggaatttcaaggagtcaagggagtcaagggagaaaagtatgaaaacgtgagactggggaggggatctggagaggcagggataataagttcaggcggtggaggtgaagatcatcccgttcagcccgctaagttcaatgtaggcacgtactccggccgtacaatgtactcgtccaacgttgctgatgcatttacgtattcgagggtgttttgatattagcgtgaaaggtactcgagtcactcaatttatacatgttcacggagtacatagtatatgaacaccccttgcgggtgaaacaaaaacatagatggctgggaacacagaaggcacagagcaagtacgaagtacactgtccttgaaactaacgatatgtacttcgtactttatacataatgaactcaaacactcacgaatagacttttctctacaatctgcatgtcaacaaacaaacattgaacgttacacagacccgcgatgatagttccccgattccatggttcccaattcgagtccacggattatgagagtatatcttgtgtagtaccgtggtactgtacccaaaataaagtctaattccatagacacatataaagcacggatccatagatgtacaacatatccacagtccatacaatatataccgatctcatacaatgcaggcacacatcgtatactgcaatgcttgcatttctacccttgggttatgaccatagtcagcatacgttttacaaaagttgcatgggatacagggtactctccagatagtgcaaaattcccctcgagcccaattcactcgatgcatcccaatccaaaagagtcacctgcaagcgcaacacatcttttgcacaccgccacttgaacttcggaatgaagaaaaaaagggcctagtgcggggcaggtggagagtcaaaagggtcctctttttctctctgactcattgatttaatggtgacactgaatctgttatagctacagggaattgaatgaattggaaatgataagtcccccatggattcattatgatatcctattccagcgcttcccagctaaaccaaacaaaaacaatcagtgtagagaaatagattgacaggacgaagtagaatacaatggggatcgcgaggaaaattgaaaaccgcatgtgacaaacaagcttgagagtccaaaccgagctaaacacttccgagaacaacctcaactaggccggcaccatcccaatggatcccaaccaggttcggattttaggctcaggttgaaagcgagacttcgggtgattgatgtcggatcttgggtgctgggaatccgtacgcctcctcgtgctctctctcataccgttggcgatcttcgatttgcaatttgtagtagcgctagattactagtcagcacgtgcaattcggtatgtatcaattctgctcggtgtccttacttctttctctgattcgggtagttcattccaatcgtgggcaataagtgtgaatgcctctgttccggacttcccctggtaatcaatggtttcgaggcggtctcccaagtataagaggtaggcagatttcgggagtttgggcagacggtcatctttgatggaagggtagttcttgtcgacaagacgtgaaagggataggcgggcagtgttggcatccttgatctgaaggggagtgtgcgacttgacccacgactcgtaggcaacagcgttagcagctatgttcaccttagcctgggcttggagtctctagatttgggagatcagtatatcgctcctgacgtatacggagaatctcaagggcacatacctcctcatcttgaggattgagggatgtggaatgctctacgccaatcataaaagcttccttgaccgggtattgacctttgatcgcgcgcagcttctcagacaaagcaagactgtaagcagaggtaggcagcttcttaggcgggcggatcagggcagtcgccttgagttctctgatctgagcccggagttgcttgatcttccgattttcctgttgtgcctcggtgagatgcggcttcttcgctttgatgccggcttttttggtgctcttcgccttaggcgtcttggtcgccttgggcgtcttagtcgccttgggaggggtagaagcagtagcgaatgaattagactggaatagggaacggatggaggaaacgggttgggcttgcggacgcatcgacccagagttaacggttagacagatgcgactaagctgattctgcaagtcgttcacgccagtacggggagggagagcaccgcggtgcagggtgcggaggaagcccccccgagctgcagactgccaagtcatgaggagatgatcgatttagctggagcgagctgcaataatagagatcgaaatgcgacaaattagcaattgaatctcgaaaagttaagaatcgatcagaggagctgttgacgcaaaccgagtaggagtcccgcctgctttggtgtacctatccgcatcgggcctagctctttcacatggccttatgtaagctgtcattccaaacggtttgcgcaagtgacaatatggtagacaaacacctcaacgttctttctctcggtggcctgaggtttgaatcgtgccctcaaacgcttttcttacgaggcgctttttcttctcccttctctttctctccccctcctctttctctcctcctcctccatcaatccgtgtctcgggggcttttgcgttctagtaaaactcactgatcagcctgcaacaatggctcgccacggagatactcgctcaccatcacctgtaggcagcacactttcttcatcccgacgacctcgcagagaggatgatcgctatgacagaaccaggcgggatgatgggcgcagttaccgcagatcccgcagcccagaggtaagtgcggcgcatcgcatattcgtatcttatcttgcaatttctgaccatccttgtgatatttagagacgataccgcgggcgcgaccacccccgtgatagagatgcatttcgacgaccagatcttcccgtagaccggcgcaacgaagatacttatcggccacctcgaagagaccgatctcgagaacggcgacgaggcgacgaccatgatctccaccgcagaactcgtgatagggattaccgttctaggcgagaggactcccgggatcgggaccgcaggcggatagatgatcctgctgacttgaagcccaagtctagacgggatgacagtcgtgatcgtgctttgagccgacggtctagatcccgaactcgagaggtaagctgccagcgtcttcgattatgccgggccctttatattaactgtgtcccgcagcaatctaagccgtccacaccggttcccactgcccagaccgacgaggagaagaaagcagagagacttgccaaactcgaagcatggaaacagaaacaggccgccgaacgcgaaaagaaacaacgcgaacaggcatcagttgatcccaagaagatcctcgaggcgattgatcggaaatcggttgtatctccaagtcctgccgcatttcctggaaagttgaagttcgatccaaaggccattgctaaatcatcaaacacgacaaccgctccccccgctgtgcttggtatcgatgttgccgtcccggcatctgccaaagcttcgtctgtgacaaagtccaatatacctagtactgtgcccgacacgctctctgagcccttgaaagccaagggtaatgtcagcgggtttggcctgggtgcaagacaagttctcgaagcagagaaaccctccgcttctaacactctgggctttggggatggagacgagggatccacacgcaagaaactcgaaaaattgccgaccacgactctcgatgtgacggctgggcaagatgatgtagacatgcaatctgaaggaaccgacgcagcagctgaaacaagtgccgcaagtgaacaccgcaatacacgactccacaagcaaaccgaggatgtccatatggaggactcgacgaatacgcaggctgattccactcctatggaggttgacgatgctccagaaatcgaccctctggatgcattcatggctgatctccaaggctcggtgccgcctgaacggacaactggggccacgttttccaagaacgcgcaccatcaacccgaggctatgtttaacgatgacgaggacgtggatgtgaccgcagttggtgatgagaaggctgaagatgtcctcgagatggcacaagcgaagaaaaagaagcgggagaggcctgagatcgaccacaccaagatcgactatgagccgttccgcaaggaattttacactgaaccctccaaccttgccgatatgaccgaggaggatgtagcaaacttgcggcttgaactggacggcattaaggtccgtggttccggcgtccctaaacctgttcaaaaatggtcgcaatgcggtttgggtgttcagacgttagatgttgttcacaagcttgggtgggaaaccctcacatccatccaagcgcaagcaatccccacgatcatgtccggtcgcgatgtcatcggcgtggcaaaaactggctcaggaaagaccggcgctttcctggttccgatgttcagacatatcaaagaccaacgacccttgtctagtacagatggccccatcagtatgatcctggcgcctacccgcgaattggccacccaaatccataaagactgtaagcctttcttgaaggccctgggtcttcgtgctgtctgcgcgtatggtggagccccgatcaaagatcaaattgccgagctgaaacggggcgcggaaatcattgtatgcactgctggtcgtctcatcgatcttctggccgcaaatcaaggacgggttctcaatctacgccgtgtcacatatgtcgtcttggatgagggggaccgcatgttcgatatgggctttggaccacaagttgtgaagatcatgtcgaacatccgaccagacaggcagactgtccttttttcggcgacgttccctaagagtatggaagcattagcccgcaagactttgaacgagccagtcgagatcacagtgggtggcaggagtgttgttgctccagaaatcacgcaaattgtcgaggtccgtaataaagaccagaagttcgtccgcctgctcgagctcctgggaaatctgtacgaacacgacgcgaatgaagacttccgcacgttgattttcgtcgaccgtcaagaggctgcagatgacttgctcaagcaattgatgtacaagggttatccatgcatgtcgattcacggcggaaaggaccagattgatcgtgacagcacgattcaagaattcaaggctggcgttttccctatcctagtcgccacatcagttgctgctcgtgggttagatgtcaagcagctcaagctagtcgtcaactatgacgcacctaatcacctggaggattatgtccaccgtgccggccgcactggacgggctggcaacaccggaaccgctgtcacgttcgtcaccgaagaccaggatcggtatgcgttggatatctcaaaggctctcaaacaaagtggacagccagtccccgagcctctccaaaagctggttgatgggttcaatgagaaggtgaagtctggcaaggagaagaatttctcacgccatgggttcggtggtaaaggtctggaccgtctcaatatggaacgcgaaactgcgcgacagcgtgagcggaaagcatacaaaaccggtgacgatgacgatgaagatgacaaacttgagacccagcaggagtcagatgatcgattgaacaaggctatttcagctgtccgatccagtgctgacccggctgttgcaccggctgcagcttctatatcgagtgtgccgaaaggcattgatcttgatgggaagattgttgtgcatcgtacggagagagcaccggcgactggttcaaagaacccgctggataaggtggggtctgctgttgcagatattcatgcgcgtttgagccgcgcgggtgtgatgagatcaggcgtgcctattgataaccgtggacctgatgccggagccttccatgcgacgctggaaatcaatgatttcccccgtaagttatcccgtattccttacatctttcagacaattacttaccactttattttatcttgcagaaaaagcacgttgggccgtcacgaaccgcacaaacgtggcaaagatcttggagacatccggaacctctatcactaccaagggcaatttctatcctgccgggaaggaacctgcccccggggagcttcccaagctgtatatcctggtcgagggtgagacggagatttcagtgaccaccgccatacacgagcttcgacgcctgctcaaggaggcgacactggcagcttcggagggtgaggcgcgggctccggtgggtggccgctacactgttctttaggtcataccttagttcatagtagtctcctagatacgttttcgaaacaaatcaatgattgtacgatatgctttgcgtgtctcaattcttgtaaaacctaaagataatgactatattcgtgattactttcatccggcagtggaactggggaacattggctaatcggaatgactgccgaggcattgtcagatcatctaacctaactatcaaagagaagcttgcttccacaattcatccacaaacaacgagccaaagaactgcagcaaaagaaaccagatagttcgctacaaagaagaacaataagctcacaaatacaacgccaaaaaaacaaagcccgggatataatggcagtcgtgatcaaatcaaaacctcgcataggtatgcctattcccatctccttgcagcttcagccccatctacatctcgcgcagccctctctgtgcgactgacttgatccaatgtctgcgcttgagtttgtgccttctgagcagctagctttgagcccaatttccctttattggctaaggcgccttcggcacgtttctgtaacacaacacaagtcagcaatcgtagctctacatagcatatatagagggaaacaagatatcatacctgtgcggcgattgcagcgtttgcacgtgcctcgtccgttccagcagtactactacctgtagtgctttcacccagagtacggccgggtgtagccttccagtttgtcttggccggaagtggggcgcggggtgcggcagtcccccctgggttggtgccgactacacggccaggctgattgaaagggtctgcctcattggaagagcgggagcagatgttgcccattgtgattgtgtagtgagtcgtagggatcggagggtatgttgcggttaggctggggttggcgcaagatggagaaggtcgttgtcgttagagctccggctacggtgcggagttgatattcgagtacaccaattgaatgcaggatgtttcgctagggtagaatctgtaggcgctatgctggctgtaaatcaagttgtacgatgttgtgttgttgttcgcaagtcatcgcaagtggatgttggagcattgcgataaggctgatccgatagtcgatccggggtcaaaggcggtgaacagggtccgaaactgattttagtaagtcgggctgtgcattgatgcctagtaggatgcggtgaagctaaatacatggccagctcatagattccatggctgattcaaattgaactttttcatatgtaccgcatgcaaaccgcagacaaagttccccattagggctgttgaatggcaggtcggactatatgggcagaataaagcttagtcacgatctcccttggggaaatcatctccgcatgggaaaggaatttttcatcggaatgctggggaacatttttcgagtctgaactgatctcatgtctctgtttcctgcagttttgcctctgtcttatatccatcataagatttcctgaaattgatcgccaaagcgtgttctgcgattcgctcgaaaatcatgacgcctaacccccaaggtcctcatcctctcctacgtcccgaaggtcctcacggctacactgaggggtctcagtcggcacaacgttatgccccctaaccctctcgaaatcatttgaatttgatcctgcacatctgcgactccaaggtcctcctttttgcttttcctgcacgtcgatctcggtcaattctccgattgcgcctgttcgcaattagtccagtacaagcgcgtgacacgattgcgaaactatctgcactgtgggaggatatcattcggtgctacaacctaaactgtctcctgggagcggcgcacatactgggtggcgctttgactcgtgggttcgtgattttgtagtgggatatcgtacctgacggacattcactgtcccacttacggtcgcacactgctcggttcctcaactgtattttccccatatcgttcgtcttacacactgttgtgacgacagctttcctggccaacccggttcaatttcgctccaacaccttccctctgtcatctgaagtgaaccgtgcaccatggcttccgaaacccaacaaggcgatttctgccttgaatgcaactgggaagcgttccatattgatggcagacctgcggcagatccctcgggtaatgcgtttcaacatcattggaactgttcaagtcatgaaacccagatacagctacccccttgtgaggtcgatgaggcctgctgtgatgtagacgactgcgcgctagactgcgggtccgtatgtggccactttacgggctgtgacacttccactgtctgctcagtcactcattgcgcggatgacaactgtgatgatgataactgcgacgataaccattgcggcgatactcattgtgataccaaccactgcgaagaggatacctgccaggacaaccattgtgaaaatattgaccccctgtgcttcgaagaccactgctgtgaagttaccgcgagtcaagactgcggctttgatgctatgtttggactcaacaaccaactgtcgctagacacgggcgctttcccttcgatggcaatgggaaatcattccgttgggcatacgacaaaagccatgcaacatcctttccctggtctcgtcgatccatttcaacaggaaaacttcctatcctcataccaaacgcatgccacccactgcgagcaggatgtatccaaccacttcgagtgccatgatttccagaaagactggcaggggatgttcgtgtcgcctcctgctcccacacaggccgaagttaacccagccgaggttttccacatgctcggtatgtgctctgacttctcgatatgccaagatcaacacgtacctgggcctcagaccagtgtcgatacctttgagaaacccaaaatcgacacgtcaaatgcattcaattgcttccatcccggacatcatcatgtccacagccatttcaaaaatcccaatgatttcaacctgcaggttatccgcaaaggacctcaccgcaaccatcatcgctgccgagctcacacccatgctcatgctcatgctcacgcccattctcacccgtattccccttattctcgacagtctcgctcaagcatcagctctcacctcatttccagtccgggagaaaccccaccacctctcgaaggcgactcctcatccgtactcaccacaccggacttttctccagccgacagtaagctgcatatctgcaagtggacaacggagattcgcggaatcaaggctgcttgtggtgccacttttgccgactgtggctctctacaagagcatctcgttgcctgtcatatgaataccgtgaatggtgccaagggcaatgggtactactgctgctgggaaggatgtcatcgcccggatgagccattttcgcagaagtccaagcttcaaggtcatttccttacacacagtaactgtacgccatatctttcatctcacgatctaccgagggtaggacaaatgtgctaacacgaatggtatccttctagacaagaatttctcatgctcggtgtgcggcaaggcatttgctagacaagcgacattagaccgacacgagcgcagtcatcgtggcgacaaaccatacaaatgcaaagactgtggtaaatcatttacagacagcagcgaattgagtatgtcgttgtcaaattccttttaggatccaccgctgaccaccccagaaacacattcccgaacccataccggcgagaagcctttcaaatgcacctggccaggatgcaatttcaccacgggcgatgtaagttgtccatctctatgcgatatactggctcatgttctaacatcgaaccagtcttccaatatgtctagtcacaggcttagtatgatacccctgccatctcaaatgtttaatttactgactctgtctagcccacggagagcgaaaacataaatgccttttcccagggtgcactaagagctttacacgtcctggtaagttctgacctgagctctgttcttatcgcctacatgctaacgttaatttctccgtagaccaattgaaacggcaccagaggacaacacataaacaagaagcctgctcgacactcccatcaccgagccccgatcccttcactatgacccccttcactctcgtctaattatcaactcctttgaatgcatatttgaatgcgattgtcatgtcttatgacccaacggatttaggcgctatttgccgccgggcgtactatggaagactgagaaacactgtgtttctggcgttttgtggattttcgagaaccaccaaaaagataccacctggccttgatgttgccaggacttttcaccaaggattttatcgatatattgttttacccctgaaccgatcaaatctttgattggctcaaatgatctatttcctatgtgttcttattatgttatgatttgctttaatgaactcgcatatcaggtatgatattcgcgcatacggaaaatgaagcttgcagactaagatgcatgatgcctttattccttttgctggtgtggaccacaacatacaaagtaccagttaaacattaaatatacaattgccagatatgaaacccatactatcgatgtacctgagtagtgataggccagactttgagcagccatacagccaaacccgctcaatcttcggtagccctctcctcgagcgcctcaacagcattcttcaactcccgaatccgatgtccgacccgccgacgtacttcatccctaacctcctgtgggacttctgccggattagattgggtctcgacagtaggactctcctccgacgtctctgtctcattctcgacttccccaggacgagtaatgtaaaggccgtacacctcggacagctggttgagagcatcgcgggcagattcgcggtctgaagcagcatagatggtagacgagtcagtgctctcggtagcaatttcaaactcgtcttttgcgacttcgtatagctcttgtagttcctcgaccaggatatcggcttcggctttgcctgtggatccttttcggtcggcgtaggtcctcactgtgggtttgacaagcgatgattgaagagaacatgatgattggaatgagcttaggctcagtcgtattttcctagaactggacaggctgtgcaaagaccgaggaacgagatgcagtcgctgtatgaagggtcggttgatgtggtgcgattgtagacctccaaggcgcaggactgaggagccacgcgcagatcgaatgcatagttgggcagacatctcgaaaataggggcgaatgaattaaaaaaaaggtaaggtgtactcggtaaatgattttaagaaaggagctgatcgtaagatcggtgatgacgtcgccagctgtttatcgcatcacgtgccgatacagatctcaggggtggtaataaacataggggattgtgaccgtatgcatgcatcagaccgacgaaggcatcattttattaattttatgagttcattgcgacaattgccttttttttcttggtcttattcctttcttactactatgcctatacgcctacacggagtatgaccaacatagaaatctaaaaagcggaagcatcgtgaacctccctaagcttctgtagagaatcccgatcccgaaattgagaaagaagccgaaaaggttcagcctagtccagttggcaatgaatcttaaacaatcatcacaattttcgccaatgccccattttcctccatcaaccgatgggcctccacaattttctccatcggaaaggtcttgattggcaagtgaatcttgcctgtcaccagatcccgagcgatctcctcaatgggcgttttcagtactgcctccgtggtactcgtataggtggtcagcttaacagaggtcggtatcgaccccatgggcgtgaactggtcaaaggtccatttgttcccagctatacccgtcatacaaacagtaccaccaggcgccgcacattgcagagagtcgtttagcgtggtcaccccaaccagttcaaggattttcccaaacggagcacgtttctggacctcagccaatatcgatcccccgtcgataatgacgtcgtcaataccaagaccacgtaagaactctacgcgtgctggattccgtgttgttacagtgacagagactccatgcaatcgagcgagggccgcggctgccaaccccacgctggtagttccgccgcggaccaacaagcggtcactgggagatagcgcgagactggtgaacagggaaccccaagccgtctgcataagctcaggaagagcgcccaagatatcccaaggcacgggccgatcggggccaaaggcagcggtggcatcgacgcgtcgtacttggtctaccggcacagccgtgtattcggcatatccgccatcgaaggatcggcccatgccgcccattgcagtgacgacgacctcgccagctttgaagcctgaatccagggcctcatcgacgattcctgtagcttcgatgcccagaatacgcgggaatgtcacaccgggtgaatcaccttgacgcgtgaatacttccgatcgattgagcccgaaggacttgatgcgtatgcgcacctctccctctgtgggtgttggcttgggaaccgtttgaagtttcaacacctcagggccacctatattgtgcatcacaatagctcgcatgtcgaaggacgtgtttgcgtcagcggtaggattgatgatatccgtggtgttatggtgtgtcactggtgagagtcaaaggtacgaaacgaggataacagttgcaatcgcagcaagaagaagccaggaagttcacgtctacgagcaaatatcgggacataaacttaccaatacaacatagatagtgatatcacatggcgtcatttactccttccacggaaagcttctttctttatgtaagcaagatcccctcaggtgccgagtgagcgcgatacacgtcgacattcggagtagtcgacgtttggcccggtggaattccgatcacgcaccaatcaccaatcacagcgtctgggttgcagattccagggtgataatgcagtttacttttcagtgaaatgttcatttactagtcggttctgattgaatatatggcctactgagcaagatgaatggcggtcagtggtatttatgcttcagatgtagctgggtcaacgatccggccatatcaagaactcccgtgctggaggtagagtcggagtagaccaataacggaagagcgggccgaccggcccgtgccgccccaattgcggaatgcaagtctcggaggccatgttattccataccggcccttcatcacttatgaatctcattcaaactctcattcaatagagatcgtatgagccacactgctgttggctaggacaggagatacggtcacgcaaccgttttcaatttcttctagcagccttcgaccccaacgcagagagcaacttccattgcgagaaacggattgcgattggtttagctaggttcacggctattcttactgaggttggtgaattttctgggaaagggccaatgcttgctggctaacgagcttcaatgctgtgcagtacggctttttttgtcattccttcaattccaagttgttcttagtggcggtgcctactagatccaacagccctatacttattgattctagatgtggttttgcactttgaaactggagtctgacacagtatggctgaatctgaaggctctgtatagatgtgacgctaatgcttgaagtctatcccacgatccacctatgccatgccgccattcacgcgcagaacctgtcctgagacccagccactagctggggagctgaaaaacgccatgacctccccaatctcctcgggtttagctaagcgtcctagcgggctaagatttttcatggcatttagcaccggttctggcttgcctcgtgtgaataggacggtgtcggtcggacccggggcgacggcgttgatggtgatttctctggggcccagctccttagccagaactcggaccatctgttcgatggcacctttcgtggtcaagtaaaggagatagggaggcgtgactgtggaggcgtgacaaagagtcgtggaaaccaggatgattcgaccaccgggacggagatgaggcactgctttctacaattaaccatcagcagcaaagaactttttttgtatcttctgcaggtgggttgtctgcaatctgcatgtcatacctgaaccaaaaagtagggtcccttcacattcagatcaatactgtcgttgaagtcttgctccgaggtgtttgccaggtcatggaggggcaaggaaccggcgttggcaatgacaatgtgaatttgaccatacttctccactgtacgacggatcagctcctcgctgtcgagcacacaactggcatttcccttgatagccagggcgttctgctctccaatttggctcaccacctcctgggcgctttgctcattggagcgatactggataaccaccttggcaccatcgcgcgcaagacgaagagctgtcgccttgccaataccattagagccaccggtgattatggcaacctttccagtgagagcagccataacttcggttgatgatagataggggataacgaattaggacgacaggaaaggtgaacagaaacgacatttcaagtgcttgttttgcgcgagaggagaaataatgcttcatcttgacggtgttacatcatgctgacggtgttggtatacggcgtacatgagtttatcgacggtccatccgcctctgtgaagacgtagagtgatgcaatgagcagcgcagagataacacgcaggagctagtagagatccatcgatctctccactcgaatggaaggaacatccaactgggattcgagtgtgttcaacgcgtcaccgaccggctcttacctcctggcaaagcttcaccaacagatgaagtatccatgccggcgagagcgcgattgagatgctctttgcgtataatcgatttataatagtcagaatcagtgcagacaaatatacccaatcttacgggattactaaaaagagaaagaatcgcgcgccaagcatccaaaattatctgtattgagtcattcttcgaaaatggtctggctaggtaatctattaatttaatctagtatgtagagctaaacatctcggccaagtttgttctttctccaacgcgacttacccttgaaggcctcatcaatctccccaaaggtccgacctttcgtttcatgcatgaagaggacgccaacaatgacggtaataacacagcatccaccgaacagaaagtacacaccgaagctgctcttcgcaaggagaacaggtgtcgtcaaagccaccaagaagttgcacacccagttgctcgaatgagctaatgtggtagctgatgctcgtgttcgctggggctgaatctcggcactatagactttgacggagataccccaggtgacggagtaaagagcggaaaagaggtagatgcagacaatcaccacccagccaccgacgccagtagatttgtggacggcatttccagcataaagaccgcccatcaagaacatcaagatccccattacaaccccaccgtagataatgctgcttcggcggccccatttatcggcatagattagtcccgggatggtgacagcgaatatcacaagcgctgacacaccagaggccaaaaagcttgcttccgaagaggcaagaccggccttttgaaacaattggggggcatactagagttcaagtcaaccactgtcagttgtatcgaggtatggaaagggtttgagcctacataaaggacaccatcaataccactcagctgctgcatccccatcaaaaagactgcaaggatggtccggcctaaaacgtctttggagaagatggcaagaagcttatccaccgttccctctttgggcttctcggtttcagtttcaacctcctgtgtccgtacttgcagaacgaccttttcgcgctctgcgcgactgacacccaacttgtcccacgcctcttcagccatcgcatagcgaccatggagtcctagccactgaggcgactctggtaagtaaaggagtgaaagtccacacatgaccatggagaaagctgcaagaaggataaacggcgtgcgccatgccagtgacgagtggagacttgaggttccataactaatgaagtaccccatgaccaatccgagagtaatggccagttgagggcctgttgtcagtgcgcctctggtgctagttggtgagatttcacaaatcaggacgacaagatttccaaggaaaagtccttctcccaggccctccacgacacggccaacgatgaacatggatagggtaacggctccggcttctattgcggctcccacgccgaagatgaaaacgccgatgcagatccctttcggccgaccaagccgatcggcgacatagccagcgaagaaagacgagagtgctgctggaatcaagatacatgagacgatgaggccgtgaatcgtggagttttgactaccaaatgattttttgaagtccttcatgtcggtcaccgggccgatgataccggtatccatcccgaagaggattccgttcgctgagcatagaatgcatgccagcatatatttcggtggatttctgaactgggaaggaattaatcccattacttcggcttcggcttttggtgtttgacaggctgaagatatttttcggctcgggttgtgggaagtggaaagaagaaacgaaaactcttacccctctagacccccacgtagggcagtcatcattatccattgggtacatcgtataaaatgccgttacatgcatatatcatatccatcattgctcactaggtatctgtcagaattgaccaactgtagggacttgccagtattatatattctgcaaaaaaatgtgtccccagggctagacggagaagctttatccgggattgtatttgagctcttcgctgaatcggcgtgtgagaggccgaagcttttgtgggccatcgcttctatctcggggtatctcctggggttttcccctcgtttctgacgttttatggggcttccggggtacatttcacattaccatccgcttttcgatatacatatgttccctcatcaatgtgatggagagtggtttgttccattctggacactcgaagaatcgagccaatcatcactctctagcctttcaacaaaattattcgtcgaggaatccggcagatcccgattcacctctcgctctctgctgtggcagataatcgctatcttcgcactgctcccgccagagggtccttttctcagacagattgacggagttcgtgtttcccttcagcgttccattgacatgcttgcgccagatagccttgaaggacggcacatttgctgccgtgacagcgacgttcagctcaactgctgagataatgatcattttgccgaggacatagatgaaatccgggtttactgcgaactcatgaaggatgatgatacgggccttatggggaaggcaaggattttaaagtccatgaggatgcactaatgatggatagattagctacatgctctatttcctgcagtttgaatttccttggagactcgccagtgcaacaggaacgtagtaggttaccgatgttgacaggcacgtaacatctgggtatgctgctgaattccaaaaagctgctaggggaatgtattggaaacaataaagcagccgtatggagatggagaccaagacattcagtacaatggtcccgtagacaccttagatgaaggtagtgttgttgatgagtcggagatagaagaccaagaaccccgtcttgatgcatccaaatatatacgatctccgctgcaaagagaagctgtgaggttagaacgaaaccgacaaagggaaagggtttccaggcatacctgtgtcaaaatcaatatatctttggatcaggtatccacccccatagcgaagaaaagtataaaacagcccttgttgtgctgtgttgtaaacctacacacgctattcgttgtcattcttcatgatacaatggaaactaccatcacgaccatccaccaatgatcctttccaaaagatgataatctagccccgcgaataaatgcgcaagcaagctgagaaggtattgatcgcccacgtatgcccacaaaaggaaggaaatggcgtatgcggctggctgaaacgactcaaacattttcacaacatataccgccagcgcggcatagccggagccctaaacccgttgtagcgtgaaagatcgccggttctgcagcgtccccacagcatctagcctaacagaccaatacttttcctttgttttggaattgacatgtttattcagcccgatggtggatggtggatggtgatggtggggaacacgtattcggtactcagggctcagccagcctccgaacagctggacgtcttatcataaccatatgatacgggcaactgatttcgaaaaaagaggcgtacctgacagtcgccaggtctttctccgaccccttaagagctacattgttctgtctacccctggttaaagaaagcccgaccccagaaatactgaaaaacggaaaggaactccttcaggacggacagccagcgaatttggaaaagatggccgtggcaacgagcctggcggtacttctgagtccagcgcctttacggattgcacctacctttctggtgttgggagccgcatttcaccagttcattcgtccatacgaaattgacaacaatatcttttcccttgcggccttatatctgggaaatatattagccctatgcgctacctggacttatgcctactctctaagcgtaccacgtgcgatcggatgcacactactggccgcatgctacttcaacgtcggactgacagtcagtatcctggtctatcgagccttcttccaccgcctcagaaaatttccgggtccatggacagccaagttgagtcggctgtcggcagttaatcgggcgatcaaacggacacagcaccaccgggaccttcaagaaatgcacgaaaagtatggcgacttcgttcgcacggggccccgtgagatctcgatcaaccggccatcggccgtggtcgcggtcaatggttcacattcgccctgcacaaaagctccctggtatagccatgtgtccgacgatagttcaaagatctctttgaactcgactcgcgatcccaatatacaccgtcgtaggcggaaggcatgggaccgtggatttagcatgaaaggtatgagtttcaaccgataagtcctctatcttctatcttgtactgtctcaaacgtggtagctgatatacataatagccatatcaatgtacgagccgattgttcaaaaaaaggttaatgttcttgctactcagatccggtcccgacttaatcaaccgcttgacgccgcacagtggacgatgttccttgcgtttgatgtgatgggtttggttggattttctcaagactttcaccagctggagaacggcaccgagcagtctgctgtcaaggagctccaccagcaattgttgtatattggcattttgaaacccgcgccgtggattctgaccattcttggaggcatccaagggttagtgggtgactacggtcggttcatgacttactgcgccgacaggattgcggacacgaagaaggtaagttttacccgccacttatatagctgttccgccatggttgctttttccttgtcgggagtgaccttctgacgtacgactacagagatggaactcgagaagcgataaagacagtgaaaaactccccaaggacgtcatctcctggctcctcaaggccattgaggagaaagaccctagcgccccgccaggcgatcaagcgcttaacgaagatggccgtctcatgatcatcgctggaaggtccggcaaccattctccacaacccactgtaaaagaaactaacttatcttcagtgacaccaccggcacaaccctagcccacgccctctactttctggctaagacccctactgcatacaagaaactgcaaaaggaactgtctgacgtctttggaaaagccgcggagccttcgcagtttaccaacagcaagcttcagaacctcccttatctcgaagctgtcatcaacgagaccctccgcctcaagcccgctgtgccaagtggtcagcctaggttaaccccacccgaaggtctacagattgacgaggtctggatcccaggtaacacgatcgtcgtgcttccgcagtatgtcctccatcgcgacgagcgctatttcccctccagcttggaattcattcctgagcggtggttggatgagaagaacaacttggtcaagcacgaggaagctttcttcccattccaattaggtcgatacggctgcgtcgggaaacaatttgcgctcatggaacttcgagccgttatcgcacgggtggcatacaatttcgatctcgcgttcgcacctggggagactggagtgtcgtttgacgatgattctaaggataccttcacttttagtattgggtctttgcctttagttttcaccgagcgatcagaatagaggagtggtattcgacaggccttcttgaaattgagatttttttcattatgttaaaggacaaaggtagcgtcacttagttatcataagcctttgttgttcgaatggtgcgacaatgagatccacgacaatttctttcatatactgtgaacaatggcgtttgtcccagtatttattctttgaatcaaatcgaataagtgccgactcccatatagcataaatactgttaatatccacaagtatctaccaagcaaacatttggattaccttccatttcccccagatgcttcaatcttccctgtaccggatcgtgcgaatcttcttagttacccttgacttctggttcaacaccgatctccccaaaagccaagttcaaaggagcggtaagccctcccaatcaattccatctgacctgaattcttcatctagtgcccaaaaagccgaaaggtcatcttctaatttcgaaatgaaaacctgggaggaaatctaccaagaggagtgccttagtttcaaagccagtctggagacccaagctcggattttaagaaacgatccggaaagtcaaggagtggatcgtatcaatgatgttcgcaaagagctaatctcactttcgcaccaggcagagcgaatcaaagaggctgcctttgaaatggtcgacgagaccccagacagtgtatatgtccgcaatgccacccccgagtggctctcctcccgatttggagatccgcagctagaacaggtatgtattagcatggaatacagcttggaccgactggcatttgagcttagatctgatccgtcaatggaccttatggtcgccggacaccttgagcaaatgaccgacgatattgagatggattttctttagataaaaatgcatttattcatttgtggcctctatggatctacaaaattgtaataaacgagaatactcactaatagtcgggcccagtatgcggctgtaggaattaagctgagaagagatgataacttgcaattaggtataacatatgtgcaagtcttgtatctataaataaggaaagcgaaagttgtaaaaagcaattgccattctgctatgatgttcttcttaattttccagtgactttccaagtcctgacccaatccatcattaatgagcgtatacagttcgtgtcgtcatgtcttttctccaagaaagccgatttttcagtccactgtcatttccaccaagtccagcatcaaatcaatcccactctgaatgcaccgaatatgaaatttactcctgctgaccagtgatggccttgatatccttgttctgggccttgttttggtcgttggtggggtagttctggtaagagccgtagttcttgtagtttccgtagctctggtacttgctgttctgggagctgggagtaacctgagcgttgttggcggagttcaggttgttgttatcattgggttcgttgcgtgaggccacggaggggatagaatggcgcttttggtttgcgtgccactggccattggcatcggtccaaccattctggtcattctgaccattttggttgttggcgtgccattgaccatttccgtcagtccagccattctggtcgttctggttgttggcgtgccatttgccgttggcatcagtccagccattttggttgttttgttggccgttctggctgtattgaccgttttggttgttgtcgcgccactggccgtcatgctcaacttggccggtctgattggtttgattgtggcggttatcgccgttgttggcgacgaacacgccatgctgccactggccttttcggtactgtccactcgggtcccattgaccggccacgtcgttggggtccacgggaagtgcgaggacagatagaggggagacagccaaaagaagaaggctgttgatgattgaggagcgcatcttgaaggaaggtgaactagaagagattcaaacgaaatatgaacggtttttgcttcaggggtgctgttgcgatcctaaggttctcgagattgtttgtgttaaatggcgattgaaacccggttagtcgggctgtatttatatctgagaaatttcacctccatgaattatgtagctcaaaagtgctactcaatagctttggaagcctttgacaagaatgtctgaggttggctcacgccattcctcggtgtggtttgatgcgaattggcgctgtaagggacacggggaaacgtgtagttgataaccatgctgccttgcgggggataagcgaacggatgcgcgatgatctcagtcagctgtaaaagatggagtagcacgcggaaagcagagcacaacaataaagattaaacctttgagtggatacatgaagagttgcatgatacctcgcgtgagtctgccaaaaaagaattcgtggatcttgtccgcaagggggtagtaatcacattcctcgacgatcacccgcggtcaaatagtcctcatcctgtctggctagacgaacaaagtacacttacgccatttcaatgcatatgatgttgtcttgtatgtggttgatgatcccttgaggggattgtcatcttaaacatataccacgcattgggactcatgggatggcgaaacttgtgagacatgcagagaacacgttgctttgatcagcaatggctacgacctcgaaggcttcgagttgatgtcagtattgaagctgagcaaagtccgctgcgtgaagttgcggtctggggttggcgtctgctagttacagaagccaaggctgttctattgccccttgaatggaatgatcgaaaatcagttttgcgcagttttgctctgcaacatttagcaaactactcacatcattacaatggactctatcttcgacaagaattgtcatggggactattctaggcgagagtccggtgagggacttctcgcagaggaagaaggcactctctggaatagaaaggaaacaccaacgccaacgtgtaacagcttcgcggtgtgtctgtttcagctgagtgcacttgtgctggtattcttagtcgggactctgttcggctttcactggcgtggtgatttggatggcctttgcagtcgacatgtttctcaatattgtaagagttccaagcttctatggtgcaactcattaatcttattgagatacagcaactgtcatgaaggaagttggaattcaatatagtctgcaagaattcaatggctctctactgaaagagaatgtttttcgacaagatgctggcccagatgttgacgcagcatgggagtcgttgggcgtcaactgtatgtcccaaagtgattaactgctttctggcatgggctaattagaatcatgatctaagaccgcagcattcgagtaccaccagaggatgctgaaaaatctggacttgctaacgaccaagttaagattaatgcgaagtatgggggaggatttcctgcgaatgtcgagggcttgcatcaccttcactgtctggtaagtggtctagacctcgacctatgtctgtgaagatgctatactaataccgacaagaatctcctccgtcagtcgctctactataattatgactactaccacgtcaagggggaagggcccttcacgaacaatgactatatcctccgccgccacgtgtgtatgttgtgcccattattcctttctcgataagattttgaactaattattctctcatcgcagcacattgcctcgatattcttcggcaagagctcatgtgcacagttgacagcggagtgctgggtcaagtctggatttaccccgagaacccggagccctatgttgacttcaacactcagcatcgatgtaaaaacttcgatgccgttcgtcgctgggccgaggacaaccagcttcctcaggaccccccttcagactttttgcagccgccatcagagggagaccgaatctatatccaaatgccatgagacatgacaagcaatatttgagctagactcagacagtatacaatagaatggaaagaataaacctcagcataggtgataacaccaatagaacaaaaattcgctcaattcaatcaagattataaacactcaagtcatcactcatccccggcaaaacatacacagcattatcctcgcccccaaaaaccttcaaaggcctcactcccctaaattccatcccaatcttctccaaagcgccgcgactccgctgattcgtaggcgagcaaaatccaaacacagcatccaccccaagagacttctttgcatactccaaaagaccctttgccgcctcggtcgcatacccctttcgaccttcttcgggcaacatggcaaacccgatatctggggcaagataatgtgggcctggtggaatgcccctcgtgagcgatacgctgccgattggcttcaccccatcatcggtctgtcgcgagactaggaacatgccatagccatggtaggcgtagtgttccgagactctgccttggaggaatgaatatgccttttccggggtggtgattccagttttgccgcaggagctgatgaaatcgtctgtattccagagttgaactaagaaggcgcagtgggtcgggtcggtggggttgaaggggctgatttggagacgcggggtggaaatcgtgaagcccggtgggaaggagaattcgggcattgtggcttggtagttggattataccagatttgattatagaatgaagtaaagtgtgtattttcttctccttagcacgatagaattaccagtgagtcacagttgaggctggattcaaaggaagcttagcgccgacaggggttgacggcccatttaggtatgtggcgttctggctatgagctagaaagatagagagaagagatagggacaaaaatctgatagacgaggtttaacgacaagaaccttttcgcacattatcctattgtcccatcttcatgccaccgttggcacataccacactgccagtacaccagagagcatcaggcgtacacaacatgccaacaacacccgcaacctcatcagtgaaagccggtcgacgaccacccatcttctcctgaattaactgcttctgctcatcagtcaagcgactcacagtgtccccgtgatccgtcagcttgctcataggcgtgttatcctggtatccttggatatccttccagaactgctctccggccttgaagtacatatcaccgactaccgggccggggttaaccgcattgacggtcgcacgttcggacagttcacgtgcccaggtgcgagtcatcgcctcaacggctgctttggtaccgccatagatcgactggcctatgaaacccagcgacgaggatacactggagatgctcacgatgcggccgcttcggtcggttgggaggaatggggcgcatgcctgtgtgaggaggagcggggcgaggacattgatcgcgtaatgccagttgaagtgctcggcctcgatggggcccctattggcgtcgttcagggtccggtcttgcgatacgccagcattattgatcaggatgtcgatctggagttttccatcggtgctgaaatgctgctgcgcggtagcgatgattgctttcacggcttcggtgggctggcttaggtcggcttgcaagctctcgcatttgatgttataggttttggctaagaaggagcacagtttttcggtgtgggcgcgcgaggactccgaagtaaatatcagaagtaatgagcagccctttgcagccaggttacgggcaattgcttcgccaattcctgcgaaggtggcgtgttagcttggtctcttggtatgcgggggagctaggctttaccccgcgatcctccagtgacgatgccgaatttcccttcaagtactcgagccattttggatatcaatgagagatatcaatgagagagatgaagaaataagtaaaacgaatttgattgagggaggacatggccaactctttaacctctcttttcttatttagccgagttaccccatccctccccttcccacggaataaaattgcccgttgcagaatgacggaggaaatgcgtgtaattcgggtaaattcaatgtcggcccgaatggtcgactgtggagtttgttgtttgttatgttggcatggtttgcatcatttgcactgtttggaatataatatcgactccatctttcccttaccactcactcattgctagatttctgaattgaatatactcttttgctttacaagagccggctagtaacaacactgcctttgttgtaagagtatacagtctatctcagtctatctctagtggtcaatcctcccattgacactataaagttacgataggtacattgaggggttaaagcgctagcccgattaggccggttatcgcgatagtcccctgaaatggtgtttgacccggcgctcggtactgtagagcacctcgagtttgtgtttctacatctttcgggggctatccatagtgccctggcagtcctcgaagtcatctaatcatgtcacccttcaccgtgccacccggcgaccagagcgtccaggttcgaatcatcgattctactactaggattggcaaattaccactggcgtttctcatggaacctccaatggaggggatgcattatatgcatccacttccggcctggtcgttcctgatcgagcatccttccggtcaaaagattctctatgatcttggagttccgaaagatttgaactcgtttgcgccggtaatttgtaaacatctcgagacgcagggatgggaagttgatgtcaaggaagaagtgatcgatactctcgataaaaatggtatcgcggcgaatgagatttccgctatcgtctggaggtaagtaccttattcgttgattgataagtatacaaacatcgtaacgtgctgacggtttcgcgggaagtcactggcactgggatcatatcggtgacccatcgcggtttccttcctctaccgatctcatcgtcggccctggtttcaaggctgctttccttcccggttatccagcgaatccaggtgctcctgtacgtgaaagtgactttgcgtaagtcttcgattggcgttgtcatttattagttggtatataattgaacttgccccatccgctaaccttcatcccacgaaagtggacgaaatctacgggaaatagacttctctgactctgtccaagttggccagttccgagctgtggatttcttcagtgatggttcattttatatcatagacagtccgggtcacgcagtcggtcaccttggtgcattggcacgtaccacgactaatcccgatacattcatcttcatgggaggtgacctctgccaccacagtggggaaatcaggccatccaagtatctccccattcctcgtgatattcacccaagcttccctactcccagctcacttccatgtcccgggcacctggtatacgaggagttgctagtccgacggactggatcggtggacaagccattctttcgaccagccatgggaccagatattgaacagacaatagacacaatcgataaagcacaggtggccgatgcagatagcaatatctggtttatttatgctcatgatcgcagcctgttgaaatgtgtggatctgtttcccttgccggctaataattggaaggagaagaattggcgggagaaaacactgtggactttccttgaagagtttggaacggcgatcaagcagatttgaatgacatgaaattgagcatgttgatactcgcatgtaactacatcctattagatcggtgtctcatgccaggagactagaatcaacgtcccctttaatcttaatttacgctttgctgacctgtcgtcacggacaatcttgttcaaaactgtttctaataatacaagcctctagttataaccacgtgcatatctccacaacagatggcgtagtatatatttctgcggagcgcccaagccgcaaactatttcgggccacggagtagactcgtggtgattatgcaggagcaagagccaccggcgctagatccataagcttcattagcaagcaacaaacctgacgcaagccaacgtcaccagtaaggcgcctcgactaagcctgtcgaatcttttactccgtagggctcggacgacctgcataaccacccctcccctcaaccccacaagctcgtgctagcttacggatactagccgccccgctgagttggagccttcagcatgcaggggctctcgtaaaaagcctcgtgatgactgcccttatgactagttgcatcatttccgaccggggtcgacccctgggcgcttccattaaggggctcatgacccagcttttcatgcaaaattagcaatgtcatctgcatatttttggtttgcagcgttatcagctcggccccaaattggaggtcaaggtccatgccgctggtttttatttactgtatattttcaactgtttccctgtctgcacgattatagcgttcccatatcaaaaactcgatgagatagggcaggtgcacagatttccgtggaaattatattctagttacccaggagggagcgcaaacttggacaaaatgtgtttcttcaaactcaatagaacaatgtgattcctatgaaatgtaacgcactcaaatgatatctcgctataggccaaaaacttcccgccggttctgatcaattggacttattccgcttctgtatgcgcctgcttctacgtctcccagtatcttgagtcccttgatcaggaagaaccgatttgttggttaaattatccactgcgggcctggaccttgatatctccggcttgagagttgcggaaacctttcgtcttgctttcttcgggccaacaggagcggccgcccgtttcctcttagtagttctttggccaccgtttgaagcgggaccatctacttgagcggggccatctgctggtgcgggactacctgcttgatcgggaccatctgcttgggtagagaaacgcccatcaaaaagcggaggtctaggttgttgattgaaggtaacatgctcgctaggcactgtcgggctcggactcaaatcgcggtcgttatcgggtatctgcaaagtgatttcatgcttccaaaccatcccaggcaatatgccccattggtcgttccaaatgcctcttttgatccagatacttttcacatgctcgtaagcttcggtgttgatgtttgtcaaggcagagacagaagaagggctatctggggagtcagaggcattttgaactcgttcgcgctccttcgatatttgatagatgaattgatgaaatgggcgtgatggctcgtccccgggcttctgtttggctttccgctcaccgctgtggggtatctttttgtcccaaaatccggccttcgtcggttcctctcccctcgaccgagagagtcggtcgagatcgattttgggcgcaggggtaacctcgggcaactcttcatgcctccacatccaccatggctgaggtacgtgctcccattcttcgttccagattccttgtttcatccagttcttcttgactgtctcatgggcgagattgttcatatttgtcccgtcggggacatccaatgttcggttctcgattccctcgattatgcgagcttccagctcgtagacctgggcgtcaaattgcctattggcgcgtgaagcatcatgggccttcatcaattgccatttctcgcgatcacggcgttctagcctctcgcgtttatacatcgttgaggggctatcggggcttagggatgctgttgaattgtgcgaatggtgggaaatgtatgaaacgtctctgtcgaaacgtgatcgctcaatatcaagtcgcctcgggtttttaacaaggttttcgagcgcggtgtggatagtagttagaccggatctaatgctagtatcggccatactgaggggattggtagaataaaatagaaaagggagtgagagggaaataggagatgggggggatgtgacagaatctagtgtgacgtgagcgctaagctgcagtaactagcgcgggaatcgacctcgctctatattcactgaacaatcatatccaatcatttaccgcccaacattcgacgcctttttactattttcgtacagtatcagtctacttttattcgctgaaacgatcactgaaacgaacagcccccaatattaccagggtatagcggttgggcacacttttgtactcgatgccaaataatacataatgtcttccatcctccttccgagtgtctcttctccgtttgatagttgtcccctgtttgaccttgcttccttgcttcaatatgtcgtcgttcccacaccctcatcgccttgctctcttctccctccggcctctgaacgaacgagccaagaatgtcgccagccatccttggaacaaacacctaacgtcgaagttgaacgatggtacaattgtccttgatattggcttccatattcggtcacggtcccgtcacacaattgcaacactaggacgtggtggagatgcggacctctttatagagggcttcaacatttccaagatccagtgctcttttgaaatcgagccgaacaccaatgtcatcatgctctacgacaggtctcatggccagacaactcaggtttttggtcacaatgctacgccatttgagcacgggcgcgttcgtcaggtagtcgttcagaagaatctgaacgatgttctggggatgggcggcaaaatgcaagatgtctttagattccagttgctttggcatgaaaatacttgtctaacgacggagagaataaaagaactagagtccatcctagatgaccatgtggaaaacccgcgcctggctcggacagttgatgatttggaaacggttttaccgtctcagatgcagaccagaatccacaccgccggccctctacagctgaagatgcgatacacgaagattgaccgactaggatctggacagttcggagttgtatataaggctatcgatgtcgacacgggtaagcttcttgctgttaagatacttcaacagcccgagcaagctttggatgaggagtggagaaagtcattgtattatgcattgaagcgcgaggtcgaggcattgtcccaaattagccacgttagtaagccttccattctcagacactgaaactgaactgacgctgccctagccacatgtcgtcgattttatcacctcgcaaggctgggacggaccggcggcggagatattcatgggtctcaaggacggtgcacttagctccttggttctcaagggtgactttatgtccgtacacgacctcgccaaatgcgtctgccaccagatgctccaggcgctagattgtctagccatcaatggagttgttcaccgagatgtgaaacccgaaaacattctttacactgcactaccgaatgcgcaatatcgattctatcttggtgatttcggtctatgcaaccgcactgttagtgctcatagctctgttgggaccccattatacacggctcccgaggtctgtcaaagtggagcccagacacacaaaatggatgtctggtccctttttgtaacaatcgcatggatactagacttcgatggatttcgccagaacttacagcatatatccctttggcaggcccaacaagctctcctagccataacatcaaagattggagatattcaagagatggcgagagtcgatccgggcgagcgtgcctccgcggcacagatgctggtcaagcgctttggtggagaaggcctttcaactcaacgaaatcaaattccaccactcagtccaacaaaaccggtacccaaacctgaggctgagttaaatgtcaaaaaatatggaccagcccacagttcacgaaaggttccaaaacaactcacaaatctgacccgcgcccgtcagccgagtaatccgcaggctcgagtattgaggccaagaaccatagatcgccttttgacgaagaagcatgggcttctctcccatgttgttgaatcccctgggtttcgtgtgcggcggccatataaacattagagtatgcggcgaagccgggggagcctagggttgtcggtccacttaactatcagaatgcttcttctttatttcttcgatactttcttgcggatactcagttcgcgttttgccgcttcatctgctcattataattacttatgcaatgcactttgtttcttcttaaatttaccactttccttctatcgtagtcctccatacaaagtaaaatatatgctacccgactttccccgatttgacctcaggcacagatattaggtatgcacttcgccgcagaactcagcgcgttagcaacaaccgtcagcgaaaaacacccaaccgtaactgctacgcgaactggcagtagcagatgaactagccaaattgatccgcgggatagattctacatggccagaaatatactcgaaatctggccgtctacaggagcaactacaaaagaaataaatgttgacgcatagcttcgattgttgaagtactacaccgtcgcaatcggcccatggaggcccacacaccagaataaggtatcaagaataaaatccatcacgcagtgttgaatgcaagaccatcccaggtcatcccacgccaaaacaaaaacattagaaacacaccaaccccggtgtaggccactttttatgccgttgaaggacaaccacttttgagttctaagttgatggagaactcatatgccaatcataacatcgtcgaatcatgttgaaagtctatttcccaagagtatcatcgaacgcagttgaaaatgtaaagaaattagtaacggtagatctcgggcttgtaggggccgttgacgtccaagctgaggtagtcggcctggacgggggtcagctcagtgagcttggcgttaacgtgctccaagtggcagcgagcgacctgctcgtcgagctgcttgggcagaacgtagacaccgacgggcttgcggccactggcaccgaactcgatgtacttcttgccgaaggcggtatcctcggccttgaagagggcaatctgggccaagacctggttggagaaagagcaggacatgacgaaggaagagtggccggtagcacagccaaggttgacaagacgaccctcggcgaggagaatgatgttcttgccgttaaggttgtaacggtcaacctggggcttaatgttctggacggactgagcgttggccttcaaccaggcgacgtcaatctcgatatcgaagtgaccaatgtctagatgatagttagtaacgctcataccaacattttggctcagaacaacttactgcagacaatggcgtcgttgcgcatggcctcgaagtgacggccaacaagaatatcacggcaaccagtggtggtgacaaagatctgaccaacaggggcagcagcctccatggtgttaacctcgtaaccctggacggcagcctggagggcgttgatggggtcgacctcagtgacaatgacacgggcacccatggagtggagagcctgggcacaacccttgccgacatcaccgtaaccggcaacgacagcgatcttaccagcgatcatgacatcggtggcacgcttgataccatcaatgagggactcacggcagccgtaaaggttgtcgaacttggacttggtgacacagtcgttcacgttgatggcgggaaccttgagtgtgttgtccttgagcatcttgtacaggtggtggacaccggtggtggtctcctcggagacaccgaagcagtcctcgagcatctcggggtacttagtgtggacgagggaggtgagatcaccaccgtcatcgaggatgaggttgagcttcttgccatccttgaaggcctggagctgctggtccaagcaccactggtactcctcctcggtctcacccttccaggcgaagctgtaaaaaaataatcagacaatagtccacaaaaggcgcaggaggatttgtgaaagaatgtaaacttacacagggacaccaccggcagcaatggcggcagcggcgtgatcctgggtggagaagatgttgcaagaagtccaggtgacctcagcaccgaggtgagtgagggtctcaatgaggacggcggtctgaatggctaaaggagcggtcagcgcaggccttgctttttatgatagatcagatcaacatactcatgtgaagacaaccggcgatacgggcacccttgaggggctggtcggcaccgtacttctcacggatggccatgagaccgggcatctcaatctcggagagctcgatctcgcggcgaccgaacgcggcgagggactaggaaatggtcaatgattgaaggaggaaaaagttaattgagagacatacgaggtcagcgaccttgaacttctgtgcgggagcagccattatgtgatatatgtattcaaaaactgctgattgttagtgagaagatcggaattgcaggcgtaggaattgactgaccaaagggtgtatgaatgagaaaggaagaggaaagagggaaaaggagaatagaggggaaggaaaactctctaagagatccaccaaggtcccggaacgtggcaagtactcactacttacttacggtatgctttaacgtgtatagctaggtaccagatacttctcaactttctttctatctccgtagtgggctgactgatggcggggtgctgcttagtcagaatcgcaggctggacgtggcatctattaaggtcacgtggcgagatcttgtaaacaagctcttcttctacggtggttagctagtgcatcatggtgaggaccacaccttcttatatcgcaaactgcattcctgtttgaatacaccaatttgagtctcaaaacttcatgcaaaatacatgaacaaatatatcggcgtatcctaattaggactagtgcgattgagttacttgggaaacaacttcccaaggttggaaaaggtacctaaactgaacacccccaaggttgcttctcattgtcacatctatgctcccagtcatttttaacatgtcttaaggtccttcccgggtgtaagctacgaagaaatggttggaggctcaaatttaagtgagggccctatcgaagcaatcggattctcgtttcgtatgtgtcaattgttcaacagtcttcgcatttactcttatggctgccgatgtcctcgcaaggtttcatacaacatacctgttctatttcgggtggtggaatcttccgttctaccttgtgggccatcgtcatctgttccatctcggcgcatagatccaacagatgcaatcatggcattgcgaatgtattgcacggctccaatgcctaattccgctccacgatccccatagacgtcctacgaatcgtcaaaggtcttatcatctactagacttgatggtagctggagcccggaagacttcgggccaaagtacgtagggtgagagtccctctcgcttaggagcgagctcggcgcactcaatccaaatgaatctgatctttctgccaacgaggtcaaaggatcgattctttcatttcttgtggttctcggggtgtcttaggggctcttagggctgagaggtggaggacactggttggtagtgactgcgaactatagctagtggtctagtaactactaataactactaatcgaattaggtagacagcagcaaatattgcacaggttcattcactactagaaatttgcattactgacagacatatccttttatcatgtacaggatatgctaagtgatatgctaagtgttgaaaggactgtggagttggcgtaacataaccctcaccatatccatcgtgtttctcgtgtccatagaacgctgcaaaaacaagcaaattgcaagaatcataagaattcgtcaacggaaccgaaaagcaaaaagcgaaagcgaaagcgaaagcgaaatcgaaatcgaaatcgaataaacatggtctcgtaagtcatgaaaagcgcgaaaatcagatggctcgcacgtaaaacaatctagtaagatatctgcggtgcctcatgaacgcggtaaggatttccatcacggtaaagaggggtatggtcgttccgggaatcggccgtcgaaggggcatattcgatctcatcaggccagcgatgatggcgagagggtgggccctggctgtgagcgcggcgacgctcccgcttaatcgcacgttcggcgcattcctcctggaaatgggtgttttctttgcgcttttccatgagttccttccattcaccataggcacccttgatacccagtgcagcgagaccaatactcagggcgtccttggcgttagcggtcatgcggcgtttgcgggcctcctcgggcgtgatctctccctcctgtaactgcttcagtcgctccttccttttctcaatgctagtgtagacactgtgcgcagcgtggatggtggccacactggccaggcctcccgtcaccaacatatcccgcttcagcttcttccgttgcttcttctcatcagaactgtcacctaggtcagaatcactctcggagctggagctattgccgcggtccttagaaccggcaccgcgcgaagcactggtgcgtgcacatgggggtggatttcttccgtccgatgaacggtaccgacctacatctctcgagcctttgccccgtctcgagtccctgttgtaataatcgctttccgcatctgaatccgaataatcgtcgtcccgatgtccccggcgatgacgccgctctcggtcgtcccgatgctcccgacgatgctcccgatgctctttacgatcgtctccgctatcgcggcgacgttcttcttgctctccgccgagtcccagggccgccatgccctgaccgatgtagtccgaaacactcttgctgcgcttgtgggaaccacggtcgtcctcatcactgccacgagaatcactacggccgcgatgccgagaacgtgatttcgagtgtgattttgagtatcgatcatagatttcctttccggcagcagcaagggctccagtggcagcgaggttcttgagaccaccacctgaagagtgatcccgaccacgagatcgtgagcgcgaccgtgaaccgccaccgacaaagtgactggcagccagacctgcaagcgtggactcgagaacatgacgtgttccatgcttgctggggtctctgtcgacaaggccgtcggttccagcagcagccacagcggcagtgaggacgcgctttcctttcgcaccggcccattcgccaggctctttgcgttgtttgaaagcctcaactgcaccagctgtcaaagcggcgcgagcagcctgagcgatgcgctgcgtgcttttatcgcgtttgctgctgccgccacgatggcgactgcgtgaatctgacggtgaccttgagtacgatcgatggtgatggcgggactgggaacggctgcgaccacggtcgccgcggctggaagaagcagcggcacccccgaggcctatggcacccagggcttgatcgctgaacgacttgcgacgtctgttgcggggtggagagcgacttggcgaagaagaatcagaatcatatctggagcgacgggagcctgagatatattagaattgatctcaacgaaatctgctctatattactcacgttcatcctcgtagtgtcttgggcgacgaggaccagagcttcggtagggagcatcgtaagcgccgactgaggaggcacggcgcacattttcgtagacaggtcgtctcgaccgccgagagtcataagaccgctcgtaggtatagtccgagcctggcggatagtcgcgctgtatctcctcgaccgagtcgttgctggcacgaggcacatatgagtctcgctcgtgtcttctataatggccgcgaggttcatcatatggatcggcgtaactggtggggcgtgcgtagcggtcgcgataacggtcctcgtagtacgccatggttgaggcgaaagtgaggacacaaattgaaagataaagtcgatatttgtgaactactaccgtccacggggaaaataggtgggatggaaaaagaagttcgtgaggggagatgtatagcggggctggggtggcgtgacgatgtgggttcagatgggcgagcgaagtatcgtatctggggctaagagacttggcagtggctgagagagatagccctggagtattctagaggtgatacttggatgaaaagtacaaagttcaagggacaattctttttaaaacggtatatatagcaaaatcaggattgcgccaatgacgtacaaaggaacagcgaagcattcttcaaagcggatataacgccatccaatatcgaatgagcatctggactggcgttgtgtatcagagatcagataggactccgacgtcatcctgcgtcccaggacggtctagccctatataatatacacaaaggcagacaattggataatgcttaactgcttaatctactttcaaagagatgtacacccttggaagtatacagtacatctgagatgcaatatcaaatatcggagattaagatttatggaacgtaaacaatggttccacgggtcgccttcgggggtcccagccgcttacgatctggccaacacgacgccctggatctcgttgggtgcagaactggttgcacaacatttctcatgggaatccctgaagggaagctggacagtatttggctctctaacacatcgccgcccacaatttcaaccatcacacataacacgagaatcagcacatggtacatgagggatataaaacagggaaataataacacatagtaacacgtatgatagacctagacgtcacaatgatatgaaacgcgcagtcatgcagaatcgctgaatatgaaatacaaaaacacaaaagcacatccgagagcccaaaattgaccaaaagaaaagactaaatagacatgatcgaatcacaccgcacagcagtggccaggcacaaaagacccaacagaaggagaaagtcgtatactaaacagcaaatagaatggacggtcggcgaaaaccgacctgctttcttagggcgcctggggaccaggcactgggacagaccctgggaccggccgtgcacctgcctcgataggttgactgacattgcgctggtgcgagacggaggcgtataccgcgtcaggacgagccatcgcccaccgagcatcaggctccgactcggaaatagagcgcatctcgtccgagtgcgagcgatgggtccggatgtgctgtttcatgttgtctttcctcgtaaaggctttgttgcagatcggacagtgcacgctcttttcgccggtgtgctttttgccgtggcgcgcagcatggcccgaagtcgtaaatgtggaagagcacccatggctcgcggcataggggcacgggtacttgttctttcgccccgtgccgcgcgtcgctccggtctgagaagccgtttcggatgtggttgaacgagtctcgggtgatgttcggggagctgctggcccgcgagctgggaatcggtatggttcccgtcgcggatcctgccgggcatacgggtggtaagatgatggttgactggtgagatagtcgtaagctgagccatcggacgacccgggcgaagcgggctgggcgacgtccgtcaccgcgtctgaatgatgcctgctccctcgtggtgatgttgctggagattgggatgaagctgcagggcgggtatactgtgggtcgctgataggagagggtggtcgctctgaatgtggatattgtgatgatgatatgtgagtccgactaagtcggggcgcggaacggaccgcaaaagatgggttatcatcattattcagaatggacacaatactcgtcctacaagtggacatctcctcaatgccaatgccccgatatgcggtcaccgaggctgggaaattatactagagacaaaatgaagttagtttagactgttggcaaccggctcagccgggctctgggaactcgcaagaactcgagagatcgccggtctgagacaaggggagaaagggaagagggtgtagaagaagagaaagaatatctctctcatttcttgcccccccggaggacccgacaaacgcaccagcggctctcgaaatatgtttgtcctctgtgtcgtgtaacacgtcgacaacattagaccttaaatgggcactcgcctgcagacctgaacggaggcttgagcttgtgccgggctccgtgtcttttggaggcacgggtgacgagaaagtatctcaaaggttgttgaatgccggagatatgacgacttggcagcgatagtgcaaggtgaaatgcgatagacgtctttccctcgctgtagaacttgttcaaaggctctggtcctcttttttcgccttttcttcctaggatttcctttttttcctttctaatttctgcaattgtatgtggggaacacaatcctcaacggcagttgcaaaccggcctggggatgttgcagaaaagtcgaagttcaacgccggttgtctaacccaagtcacagttcttccagatgttaggccgtctgggaataagtagaaacgaaatgcgctctgcgcgtgcccgtgatagaggtagtggaaatgagtagtcggatacgagataagaggggattgaaatgatgagaagtcgaaacgagataagagttcaaataggaatatagatcgagtagagagaggaaaaaagtgaagagcagccaaccatggccatcggtaactaattatactaaaaaatgagcgaaagaagccaagctccagggtctgtcgaggctccccagagaggatacacttacggagcacgctatttagttcggtggagcccttcaaaaagaaaaaagaattaatagcgataatataaaatgctaaaaacaaatatctacaatacaacaacaatacagaccaagacccctaatccacacccttgtacccgttttcttctccgtttcttccggcccgcccgctaactactccagtgaggtctgtgacatttttccatttttatctgattcttggacttgcgttgctttttttcccttacgtctaaatataatactgtatgtgcagttgggagtgttaactccgactggcttatcatgcggactagggcttcggctgggccaagcgaaaacagggagagatccaccatatcggcagaaccgcgggcaatcatgagaccattggaccctgagcaggttaatgactatctttgcggatttatggatttagttttattcttggcttgagggagataaatcagaaacggacaagcttttagccctgtctatacgtattcgtcctccgcgctatagctcttagactacatttctctctggggaaaggctcagaacatacgtaagtgatgatgttagtaccttggcctgtttgggaactcacctccggcttgggattccatagcgggtattaggttcaattcgggaaatcctgcgttgattggtggctttaggttcttacttttcccaaaattatatctttgttttattccgttttccttcttttgctattactgcagggcgatctcgccttacggtaaaagtaaaaaaaaaagtaaaaaagataaggcataaaaggtctagccctgagatctccaacgcttccaaggttcaggtttcaacgctttgataatccattaatcataacgtggctcccttgcttgtcggactttcgctttcttgaaagagtactttgcaccgagatttcttctttttccccgagataacccctcgtaaaaagttacgtggacgatggaggtatacacgaggattgcctccacatgagtaaagataccctagtgaactattcaaccgaacctagatcttctgtcacgtctgctttgaacattccaaatgatttacatgggagcccagggggtgaaagggactggcccgtgcaactattcgtattcgtgttcatccgccccgctccgagaatccattcgcggggactctctccagggctgactttccctctacgttgtagcacacgtactccgtaagtcggtatataatgaaacagactgctttcagaggttaaaggggagtgacatgtttagcagagatagagcgacagatctgatattgtaatgacattatcaaccgtgtaccgagaatactctatgtcatatcaattccatttccattcatttccctcgtttctcccgcaaatacctcgtggcaacgccgatcaagccaagcttcaatcttccgatctactggaactagcgtcagaattatgttgtccaaaattcgtggctggaggacgcggaccgttttggggctttctcagccgagaggtgatttgcctatactcgatctcggacggggccatacgtatgcagcctacgtatatccacggtagacgtatatccggtagttcgggatgtctagtgcagcaaatgcgcttccgtgcttgtttcgactaaggatttagtgttcggatttagtgttcgagacacttctcactcgccgagcttacgccacaggcttgattcgtcagggcccttgtactcgtcttgtttcgaggtgcctggaaagaccctgttttttattttcccttgtttgactaggatgcagggcctcgtggcccgcttactacgatgagactagtctggcgtggaccagtagcatagcgggtgctatcatcaccgttcccgcttagcggcatgggataccctaattgtgctaactacaaccgccactttttttggcccacgcggcctttttatatgcttacgtgtttcaacccttaacccttgagctagttagttagggcgtacggagtacggtgtgcgaagtatagaggcgcagaaaatttcacttgaaccccgacaccggagattttatatccgaatgtccgaccaaaaagaatttgatctccactcggtttccaccatctttcccatcttcgaatcagaagggcattttcagctgccgcccgtccaatttgctgcctgatgtccagattacagtcggtaagcatgtgtaagcatatgtaagccaggtaatgttcacaagtcaccggcatttatgcttaactccatagagacgatccggcagatgccttcccggccatctcccagcgtggagcctttcgcttccacactcgtgttcggatgctttcgcgctattgatcttgtggtctatttcgaggatctggagccacttctgggtaattatggacctgtgctgagtcatttatctaggattctagttcctgggcatgctcaacatatgaacaggttcctggacccctgcttacaaagcggaggaaaatcgcccgggctatcatccgtatgtgactgtgggtatggacttgccatacataactcagggctaactacggagttccattctccaaaatggatcaaccggtcccttgcaatggtctgagcgcccacgtatgataaccccaggtatcgcagtttaggctactgtcaaacctgggaaatccattgaatattcactttgcctcggggagctctgttcttgcccgtcccagtaaggagacacacattctaattcctaacatatgttttgtcgtattccgagacatttgataattacatctcaagtcaaccaaactgtatatcgaacgactcatcagatctcgcgtagtatccgtcatctctcaacaattccctcctattccccagttatctaagtttatgtgcccaccttgaattcgcgcacccaattgtatttagtggattgttgtaattgacattcgtactagtaaacaggaaaacacaataactagcccaccttctcaaaataaacatgctatcaatatccggccacgcggaataggcataatcataacctccattatcatgcgccaccttgccaataaataagggttcggccggatctggtcattggaggtggagccgaggacgtataaaaatggatgacgagagcgtacaacgtactctaatctaagtgcacgcggtgatatgtggctgagagaggcgcagttcatacctgacgcgaacacctgggtaatccacgacaacgactttagtacagcgatgcagagagatccggtcttgataagattgatttaccttgattttttgcttgttttccgtcccttattggctgccaagcagccattgagccttagcgtctctacgtatggtgtactatgaatgaagctgcgtcagcagaaacgtcattttggtgggctatctatgctccatactggtgtcgcgcgcatcaagggaaattacttcgaacagaggttagcccctgcatatttgggtggggagatatggcggctacctagagatggtggtgggagtctcggggagttttcggggattcgccgagcggagagggacgaatacggaatgggggtcgtattgcgtggaagaggggttatattgttggttatcttaattatagatgttcgtggaattcctaacaccgttctttctatgatgttagacgttggttctacacctaatattatgattgctggactattgactgtcagtgtgccggtatcgatacaaccacgggtctcttgcgaacaccccttaaactgaaacgtagatgagacagctaggcttggaaagctaataaggtgagacatctggttacaagctaacggcttcggtgcagtctaaggaataccatgccccgcgagattgactcttgtttcatcattcccacttcccctctgatcttgatgtggttaaccagcagaatacaatcgagttgagttcttcaaacgcaggtaataggtatagccctcaaataatttggacacacattaagtaatagaaccatgctgacattcatttatcaatctcagactgaacagacaagtttctacgtccagtccctcctctccaaatcatgcagtaccttgatcgtaactcttcataaccacctacctatgttctggacgctataccatgcaatcagccaaagctaatcgtctagcctgcctttccctctatttctcctcttcgtcctttatcccatacccgagaaggaagcaagtccacccttctctccaaggccgagacccgcacgcatgtcatccgacctcgaaatgaaagcgaagccgttcggtgcgacacacgggcaccagcacccgggtcctgcgtgtgacgagtggccacgcaacgtacagcaaacacaatgcggggtttgtcaagagacaggactttgtgtgatgtgacatatcctgaggctcgagggccaaaaagggtcatgcgaaggtccggcagaatggaatcgcgcatctagactactggatggctttcttctggtggaaggggaacaggaaggcttgcatcgctctcggagtagcaatcggcatcgcgggagagacagattccgctagacctgcgaatgccgacggcgaccaattcttctatgccagagctcgaggcgtttggaactctgttttgcttggcttggattcctcgcggaccagtcttttgctcgcggaccagtcttttgctcgcggaccagtcttttgctcgcggaccagtcttttgcgtcgcgttgtcaagtgctgcgtggcatgatacaatgaagaagataggaaatgcgatgcaaggcaatgaattcaaagtcaggacaagtacggagtgcaaaaagggaaaggtaacccttgactttggcgttattagcaccacactctaagcaaccgagttatagaacccggttgttccttccaaggttggcaactatttggctttatcaggaaagtacaaggttagggctgaactttacaaaaaaggaaagcgcgtttcacatcgtttctctacctatacctacacatggataacagggaccaggggttgctcgattaacgaggcaccttgggctgtttccatcttctgtcctccataccaattacaattcctcatctgtcataccttcactatcatgaaactcgtcaaaccacccgattggttctagttctatcacatatataacatatgcatggtcctgaagagataaccccatagcattatctccactatacgaagctacagccattatattttccaagatccaaaagttgactgaaccctagtggtgtaattatgacaccactcgctagggtccaattgaggctctgttcaagtttcatgcctttacccacaccatctgacacagcttccaataagtgattgaccgccgataaacagtacatgaataatatatttagaatatggtcgacaacatgcctggccgatctgagattcgatttaccgattcgatttccagcgctgttcatgcaatagcaaactaaaaacggactcagaccagtggagtcaatttcagggaagctttcggccggctatccagagttggaaaattcgccgatgaaggatgggggcggaaatgttttcccttgctcctcagcctatgagtcgagttcttggtttcttcattcaccatcgacactgtccgagaatcattgaaattcagccgcaatcagatttccttgttctactctcggcatccaaacacctggaagtctctgatcaacaaaatgaatcgcatcgctttcagaacccatgttgtgggtagcgattgcggagataatgcggagcactaggggctccattcgagggtgggtttgcaagtcttagggtcgaggctatttgtagcgaatcgggctctcaaccagaccgcatcgggtcatcctcacagggcatacaaattccacggacctagacagcttaaaagcgctaggattcatcgtctcattggcctatgcagcgacgcgcttgttaatcttacttttgtggaagacctggtccaacagtcttcaaacgagacattaagaacggggctgcttactatcctcgttccgaactctcccgccgtttcactgtgattcgctccgtctaggctgtgcaggggactgtatcggcccatatataggcgctgtatagtaagtacaatatatagtgcggttaacaggcgcatcgcaacaatctcttgaatagcctcatgtcagagtctagaatcgtctaaaaataaccaagtaccctgataaacaagatctcagtacgcttctcgcttaaaatgcaattaagcccccaaataagcaaaagcgcagaccgacatgccaagcagctaaccagtttacgatagggctaggaagaacagtacactgcccaagtggacccctctatttcagccccatgaccccttttccctatttttatctgtaggatgttcttgctttaagacggttgtcgttcttttttgttttccgtgtctgtacggagtgcaagttccacgatggcttcgtcgtgggagtcgcaacactcgctgctatccgaagattcgatcgacgctcgaccccagcgttcttggaatccactcaacaaccgccgcactgactcggagtatcgctaccatccgccctcagaaaccacatggtctgaagaagtcctgcacgagattgggctaggcatctcgtccgccgacgccattccaatagaacttccgggagacaatcgccattcaaccgatagcgctgcgactacaactccatatacctacaagatcccgcaattttcccagactccgactccgcagactccacatgcccactcccacgtgcggtgccctaatcgaggaacggtcctccaaaaacggctctcctgggtcccattgacagtcttggttctcgctgtctatgccaccgtcttttcaggtatctttctcggcattgcgctgcgtaagccccgatggcgcaatgtgtccggcgatggaccagtggctccatctacagcaaccttgttgagctcggcttttgcaaagacgatcgaattgtcttatgttacgatttgcgtcgctttcctaggccaggtgcttagtcggagggctttgatgagggattctcgaggaatcagtatctcggatatgaatatgagggcctggattatgcaacccggatctatgattgtgcattgggaggcgctgcgatattcggcgctcactttccttggggcgattgcactggtttcgacgttcgtggcgatgctatataccaccgcggcgcaagctttgggtaaattattcctcttccacaacttatgtcaaagactaatcaacgacagttgctccaaagctcactcttggtcctatcgagccaaggttactcgagggcaaggtaacctccagcttcgcgaacccaaaatacatcgcatcggactgcgcgacacccgtgaccaacgaaatggacccggagtatcgcaacacaacctgcattcagattgaacatgtcggccacgcatatcacaactaccagcaatggataacccaatggagcgaggtagtaagcagccacaatgatacctcaaaccaactgcgaaagcgcccacagccgacaggctcactatgggacaacaccacaataacaggcagctggattgatatccaagatatgtccgctctgtccaagaaacacggccgaatggtcaacaacataacaatggcaatgccgcatggcggcatccccgccgcagcaatgaactccaaaaacaaactcaaacaacccacagacacctccggtgaaggcaaatacaacatcgaagcctccgtcccctcgccagccattaatgtcctctgcacaggaatgacgaaagacgagctcaaacccctagtctactccacctggcccggcggtcacaaattcaacatgacgacgtggagtacctcacccccagacgacatccctcgagccccatcctggctgaaccgcacagtcgtcgactcgctcttccaattcggcccgaaatacggccaagtcccacccgtcttcggcaaatacccactcccatacaacacgatcctcaacacaacaggaccctggcccgcaaacgccatctacctcctcggcgcgacgccgccatccaacgacagccacatgcccgagtacgtgatgtgctctatgcgcgggaagcaaaccggcgtgtgctcgaccaagtactccgccgacacaagcggcgccttcctcggcacaaactgcgagagcgcctccaacgacctccaatacgaccgccgccaagacgtgttctacgagggcgagtggaacccagactggaagaacatcgcagcggagtgggcgagcgcgctcagtctgaattcgggtatttcagacggcgcggccagcaacgccagactgctgatgcagatgatgccacaatataacaagaaagaagggactttcgcgctggacccgactctgccgtctatcggcgaggggctggcggtcatggccgggagcacgcttattctcagctcgcagaacgcgccgttcgtgccgttttggaattacagcattgagaataataatgtgcttcccgagcctgtttaccaggtctttaatgcttccatccaggcgtttgggtatgcttccggtcccacggagaagtggcaggggattttctacgtgattcttgtgtttgcgttcctgaccagcgccatctgtcttgggtttatgattttcgaggcgcgcgggcggcaggtgactgatttcacggagccgcagaatctgttcgcgcttgcggtgaatagtccgcagacgacgcagttgaagggtgcttgtgggtgtgggccttatggggaccagttgaaggagaggtggtttattgggatggaggaggatgatgagcattattatattcgaagtaaggcggaggagaagattccgttcgtgcataagtcgatggactcgacgcatttggagccgatggagattgatgatgggggtgggaggatgctcagccctatggtcaatgagtttaggaaggtctcgaagcgccattcgtttttggcgaggctctattgaagagattcctagtacatctccatttggcggttggatgcttatgatccatcactgatttacgataatggttgaatgtaaggagtaatgcatatgacgacagggcatttcaatagcatggctggagcatgcgcttgatttcaataagtgattaacactaagatcgagatatgtacaaaataacatgaacacaacacccatacaagaactagaccggcacagtaccggcatagccctcgaagtcaaaaaaaaaaaaaccggttcaacaggtgtggcacaacgctcgggaatcgctcatacacacaaacaaaaaacgaggaagatgctggatacagataaaaatgcagcatgtcaaatgcaaggacaaaaaacaatgggctttttcaagacaccagtagccacgtagacgccatgaaaggaatgaatgagggagataaagagattcgccaaatgacctagcgaggtgaggtattttctgaggaaagagagtgagagtatgggagagttgggctccaaatagactctgagtcggaataggcgaccgtgtattcaacgatcagccttgagattgagccagctcatatctgaattggtattgttcttcggcccttccatcggaagttcatcgatatcgtgtggtatgatgacgctggatcgtcgtgcattggactgccttgccttttccgcgacgctggcattcgatgattcccagggcaaatcttgcgtgctcgattggtagaagctggtagtgtagttgctgcttgtgggacgtccaagccagctgttctggcccgcaccttgccactttggatcatcgcggtcgtcgtggtcgtcgtccgaggtgacactgattgaatctgcgctggagatgcgtgccgattggctctcgggaatcaccaggcttcgactgcccgtctcagatgggccattttccgtggtcggactgccgctgaaaacctggccgaggggcttgggctcgtcgaggaagccaaaattcaatggtgtcaacgtggtcatcggccaggcgcttccgcggtaatcggacttggtgtatccggagctgatagtcgagcggttggattggtagttggtggcaccgccgtcctcgaaatacttcccccacccttcatcagtcaatcggtcagcggcttggtttccacgcccggtgtcatcgccgacgttgccgtcgtcggtgtatatggttggtgggcccatagcaccgctggagggaattgtagagagtggactgctggtcttgggctgaggagacaatccatagcccgtattcgtcggtggcttgagggatttctctccgtagttgccggacatgatagccaatgagtcgaccgaagcagcggctagtgggacaggagatcttgccatggggtaagcgccttcggtcaggggttctatgccttgatcctggaagcttaggcgatctttattatcgccaccaccaccgcggccgcgaccgggttgggcaagctgcttgtctttcttgcgtcgcagtatgaaaagaatcataagcagtatcaaaccaaatcctaggatactcccaagagttgcgccaagaatcaccttgtcatgttcagtcagggtgccacttacagccgcagctgatgttgatgaggcgggcgtagttgaggtcgcggttgctgtggatgacgaagttgatatcgaagtagacgtggtggatggtttgaggacatcttgatctcctgttccataaaacagctcggtagagttgacccatgcgttcgaagtctggttgaagattgccaatgattcattacttttgccgctggcgagaacgacaaggccattactaccctgggcgagcgtataatcagaccaggatactgtcggggcgaatgtgctgttataaggatcggtgagacccctcttttccgatgatccgatgactgtaaccgggttctgcgcctttcccttcgagctgagaaggtagctagtggcactatttggggaagcaaccatcttgaactcctcgaggaccttggtcccggagtcggaagcgagcgcgcatagcgatgaggatgcgattggattggggagagtcgtattggagatggcccagccttgcttatctgcagcctcgtagatgaagatactaggattggtggcagagcctccaaccaaggctacctctgaagaactccaaggcaaaatgatgggctcatataatgccggcgtgccttggtcgaccgtggaactcacctcaaaggtagacgagtttgttgaaatgaggtatgtcgactgagaaacctgggtgctaccgtctgtgtttcctgcgtaaaccagtatttgcgaggtcgaggatatgtatccaacgccatgtccaatccgatctttcatctccgttgatggtaatgtctcccactttcctgtactgaacaagaagcgttggaggccgctactgccggaggagccggtcccgccgaccaggtaaaatgctttcttgtcttcgtcattttcgatgttgtcaattccaccctggacgcaggcagggccagtaaccatatgctccggtgacgggagctttttccatcccttattcttttcgaggggtatttttgcaaagccagtcggcgaatagacgtagaaagtattgttgtggatagtggagcaatcgccctggatcttgattaggggttcgggtccagtcatgctgaatggtccaaatttgattgttcaaagtcgcaacagattctggaccagtaatgaaggtaggtggccagccagaaaaggacttgaactatccaaattagagaagtaaaaggtgactaccagagcactatctcatctcgaccgccgaggcaagtgagtgaacaaaggcaacagaccacactcgatttgagctagttgacgcgacaacaggcaacgtgaacacaggtttctcggctgttttccgcgcggttaactgcgctttcaagttctccggatgaacctcaggtggatcgcgtatcggatgacgcggcgactcgggatggcacaatcagggtagtggttcaggttgtcaacaatgagaatcacaacaccaacgcgtcggtcaaagagaacatcgagtaatcacaaaagtatgtggggctgggcgatctagtcgaaaggtagaaaacgaaggaagggccaacaaaacccgattaagcgaatgaggggtggttggcaaaaaagaacgaatgctagaatatcaaggtgcgcagcacgagggtaaactcagagaaggggaggtaaaaggagaggcagaacagagacagaaaccacacgatctaagtgaaacagggaggagggcccctcaaccccctaacggaggaggttagcagacgggttagggggggttagcgaacaacgccatcccttaaggggaataatatcgtcattttcaattcgtcaggtaactttcccgttaatttggtttttttcactttaattgggtctgatactcattcttattactttattcgctctgattggttcgtttcgccctcattgctcctcttctatattgatcaggggggttcccgacaaagtgggacacctctcgttgtacctggacccccgttttacagcttggctttgacttcctagatttccaattcttctagggcgaatctcgggatatacaacagcaagggagactgcggatgtaacacatagcaatattctgcacataataacagaatcgaaataaaataaatcagttaaaacaaaacaaaacaaaataaaaataaacaaccgctcttctgaaccttggtattccctcaagagaccgtggttcctgtccgttggatccatggaaatttcaaaactgtggcgccttggcgtcccacctccaaggttcttcctctataattccactttcctatacaatgctgtacaaagtataggacactctaagcctcaatatcaaatgttgcctcaaggtatccattccacatctgactcagggattatcaaaatcagcgatgccctgttttgtaaaccggaagagctctaggatttctaatttcactcacaagtgtacagcatatagaccaattttcaattcatacgattaacgaatattaactcatcctcatgtccctagaatctcggctttctgcaatcattccacgccccttttgtacccaagtccaaagatcaactattacgcacgagcatgtgctaattgtgccgtagaaattcttcctgccaatttcgtaaatgtgatcgacaggctgatcagaaatatggcaccccactatttaaaagagggtgctagttagggtctaggcctaacgttgacatcgatccgagcgagcacttactgttcttggtaggattggaaggtaggtagttgtatgaaagtgacgctgacctatgcagtctcaatggctgtaatcgagactatgaaaattgtatagaaatcagaacaatgtgaacggtaagttcatcaactgaaagcgagaaggatgtgtggcgcgtcactgctctcgttgttgatagctcatcagggtcgaacattagttagtaccttgatggtagttgtatgtctaactgactcaagttactatccccgaaagaagttgttcgagtcgccttcgttctatggctatgatcctcaatgaacgtagttgtattgttatcaccattattttcaaagactacgagaatatccatatttacttcaggtcttagcgtctgcaatatatattttctgttcgatgtcccgttttgtgcgcaaatcattctatatatagacgtctccgctggagtacaggtagtctggctcaaagatggacacgcataaaagattttccaatgtgcatttaccttgaaaccatcagccacagacaaattaaacacttgatgcgtctgaaagtggcgtttctggcaagagtttaaatgaagtctctacaacatatcacatgttctaatcggggcatgcgattatcgactatagatagccgccaataggcacaacggatcatctaacaataacggatcgctcatgatcgacaagttagctgtcgatctctcctacgaaggatcaatatgcccatcgtggtcgatgtttcgagtgtcattactcatttaataggacttcgttaacattgagctatatatatatccgatgtcactacttgagatgtcgatcgagcgaccctttacctatgtacatggtagtaaaaatcaaattatctgaaacaaaaaacagactatgttctatataggaatggattgttcaagaacgtgctatatatgttgtaggatagagtgaaaggaaggatttcgggagtgagggataagatatggagcatgcatggggctgtggagctgtggagctgatatgcatgtactccggatgtttcgggaaaatgtctcagttctccgtgttttgatgatacagattaggcattaatgtggatagaactacggagtatccaagagctgtatgtacacatctactcttatctcatgatctgctttgtgagctgttctagtatcaatggcggatgacttcctgtttagattctgaaaagccttccgatctctaattcagccgacgcaggtaccattacagagatgtaccacaaagccagccccgccctctggaggatttgatatggccagcatgcacgacatccataccgcatacttgtctaaatgtaggggacagctaatttggaccctacatatcgattcgtgccgcttagccggcgaaaccgattcgatcgaatgagacagtgtggttcggtttcattgtcacacgcagatatcgaaaatggtattctggtctgtattatagcacatgaagtccgtcctcggagtgggcttggatggatattttcatgatataaagatccaaggtgtcaaagcaggggcaaatatgggaatcaattgattttgtaaaatgaaagctaccacgcgcttcaagactggttctgctgcttccattggtgtgccttttggagcagacgagaaagattggccgcagattgatcgtctgcagggaagacatggtctgtgtactcctcgtactggtcgtccgccaacttgcggcgcttcatgacaagtcggggcatctgtttatcgatcttttcaatatcctcgcgcgatccaaccgcatgctcgaattcttgccagttgttgagaatatccacacgctgtacacatgttagaataagccgaacaccgtgtaaattatgggaatagcaacttacagaatccgtgagacccttttctttgagcaccttgtgtgcccgagcaaagactgcacgcgcgcgggcctttgcgtcttcggtaatacctccctcctcttcttcgtcctcttcctcgcccggcacagaggcttcgaagcggctgtagttgacccataccttgacgtgatcggttttctgaaggagacgttcgtacaattgtcgaactcggtcatactcgccttcttcatcttcaaagtcaatgtatgccttccacacaagctcgggcatgtcaagggtcggttgctcgatgccaagctcgaaaatggcccttgtccgttccgcgtcgtccagatcatgctccagcttcgcgaaatgcatccacgactggctgttggaggggtcccattcaatttgcttctggaacaaagtgcggcaccgcgcgaactcgaacaaccggcgttcgatgctgatatagccacggaaaattttgtctttcggacacattccaatagcttgacccaatgtcttccgtgctgcttgtagttgcatctggcgaacttcaaactgtgccttcaagagccagactttgccgaatgtgaacttcttgtgcgggattatcctcagacattcctgatagatttgtccagcgcgttccatgtccttcgcttccatttcttcccacacggcgtagaagatccatagatagatgtaccggcgccaatatcttttctcttgtgatgggggaatctgtgcaatggcccgttcgtagatgtcccgcacccgctctgggtcacccgcagtttcctccaatcgggcaaagtcaaaccaaatgtcatagttgcgagggttctccttgagctgctcttcatactgcactctgcgtttggacaaaaccacatcctctacaccttcacgatcaccgtattgcttttcgaaggtcgtgtaggccttgtgaagaagcatagccttggatcgcggaagccggtctagggcatacttgtaaatcgctcgtgctcgctcatactccttcaacttagcctcgaatttggcatatgcgacaaagagcttctcgtccatgaagtcctcccctaacgtttcgatagccacaccgtagacctcgcgaactaagtcacttgtgccgtactcttcctcgaagcgggcccatttgatccagtttcgaggctcggggtggacgacggtaaatcgctggaaaatggcacgtgctcgttcgaactcgctatatctcttctccattttgatgtatgcgccccacgcaccctcttccggctcccatgaaatccatcgctcgaacacttgacgggtaccagggatgttgcctagtgtctcctccatgtagacatacttataccagagcttgtcgatgcgggggaggatagtcacggcgcggtcgaggaggttgcgggcatgattaatattccgggtcttcatctcagcttcgatgtagcgaatccaaagcaccaccgaggtcggatcgacgtcaagcgcacgctcgaagatggatcgcgcgcgacggaattccttttgttcgagctcccaggcggcatagcgcatccagttgttcatattaatgcggttgcgttgtacatagtcttcaaagtcctttcttttccgaccctggtactcgtgtagttcttcaaggtcggcaaagcgctgtgtcggcgcctcaaggccaggctcttgccggtcaacggcctcgcggagaagttgctccgcagagatctgaactggcgcggcggccttgttcttgacccggggagggccacgggaggcctccattttgatggtgctgtattgactgatctcgctagagaggtggtttgtgacttaaaagattgtaaggtgaggttcggttcggggatgtcgaaattgtcgggcaagtaatgatggttggacaaaaggaggggtttgaaagatgaagttggcttcaccaaatcgcagcgaccgcttaactcagaaattgacacgaaggtttctcacgcctaatccagtgacgccgagggtagcttcgacccgcagctcagagaatccgcgatgaaatcgccgaactgcgtgactggtctttatcgccacccgcgcacgtagcttccctatgactaatcacaacttttcttccaccttagaactctaggaatatcgttgctctcattctagtttccctagtggcgttctgggaccacgatcacaagcacctcatacacggcattggacccgtcggacaaattccgagtcaagatgtcaaccgctgaagagcttttacgcgactttgaggatgacgaggaggacttcgatgtgggcgaaggcgaggaagtcgacgaagagcccgagcaacaggaagactccaaggaaggcgccggggcttctaacgactttgatcgctctatttcaaccgccgatgagctaacacgcctacacaaagtcctgcgcgaccattactccattcgattccccgagctcgaaagactcgtcaccactcctataaaatacgccaagacggttgctgtcattcaaaatggccccttcaacgacatcaaggcgctgtccacatcatcagagaatatggttggcgtcccactcaagtcagtcttggacgggccgtctctgatggcagttgcgatggaagcaactatcactaaaggccgggaaatgaccgagtctgagctcaagctggttctcgatacatgcgataggattttgaagcttgatcatgagcgtgctgctcttaccgcaagcattcagtctcgcatgaaccagatcgcccctaacctggcagctctcatcggggcggaaacggctgcacaattcctcaaccaaacaggtggcttgcttgaactagctaagatcccgtcctgcaatttgggtgcacaaggatcacgcagatcagaaggactgggctttgcgaccaatcacggtgttcgagcccaaggtttcctctacgactcgccacttcttcaagaggttcctctggacctcagaaaacaaggaattcgaattgttgcagccaagatggtactcgctacccgcgcggatgtctccaattacgccaaggacggttctctgggcgaagaactgaagcaacaatgctatacgcgactggagaaactcaccgaatctgcgccaaacgccggtaccaaggctctccctgcgcccgatgataaaccctccagaaagcggggtggttggcgggcacgaaaggccaaggaagctgtggctatgacggaactacggaaggcacaaaaccgtcttgcattcggtaaggaggagtcagaggtgggctacggcacgggctctggaaccgttggcttgggcatgctggggcaacaggacgatggtcgcattcgtgcaactcagatcgaccagcgcacccgtgcccgacttagcaagaacaacaagggctggggcacaaacacccccgctagtggcactgcctcatctttgcgtgggtttggccagggcggtgcaagtggcactgcaagcgttcttcaggcacgaggtattcgtgcatctggcgtcggatcatctctacctggcgccgctggtacctctagtactattgcattcacacccgttcaaggcctggagctcgttgacccgaaggtgcaagcggaattgaagcgcaagcgcgatgctgaggaaaatcggtggtttaagtccgggacttttactcaagctcctcatcagaatcctggcaattcacagagtagtgaaaatggcggcttcaaggtgcctgctatcccactcaagaggaaggctgatacgggtgagggcaagatgggccctccgcctaagcgttaaagacttcatttgttttctaaatttcttgcttgattgctttttatcgcggcattttgacggcgtttcagggggaagatcaggaggcctgagcttcaatatgatttacgtgataccaaacccgattgtatattagatctgaactacagtcctcaaaatgacatctttttaacggcggacctgtgaatctcctttttttttctctaatacgccgacataaaagacctttattgactgtttgttctctttcaccaaaccagattgtgcaattcgagctaggctcttgtaacagaggagagtcgatgtcatactgattctttctgtctttgaaatcatttaaaatcagagtttgtcctttcatattgaaatcctagtgccaagatacgccagttagtctctttgtttgcctggtggtgaaaggattggggacggcaggtttcctctccatttgagaatgtttccagcatcagtccatttgctgtcgccaacttgagaaatcagagaagaaattgccccgaaacactatgccggacgatcgcattgatccacattacacttagcccctggttttgttgactgatttatgtgaatcgagccaagcgaagcttagtgggcttgtcaagtcaacactcgaggacgatctcaagtcccattccgaccagtattacggaacatctgcccaagctgaaattgcaactcattaagtcgaggtcaaggtccatttatggtcaccacctcgtcgccttctagagtctatcgcccaacaaggtccacgtcgtgatagtcaaagcaatctctatgcccttgctatcctagcatatcgatcgggtcgaccaagaatcatcgcagcggatgaagcaaccaaacgtcagctgtcaggtaaatttctcgaagatcgtaatctatattcaagaagagaaggagggcgcatctcggtgattctcttatccacacgcagggatcccgattcgggtgagtgttctgttttcgcaagacgagccgtgtgctccctacagaaatcatgttcaatatcgacggcctagaaaatgagtttggcgattcagatcttcaagcaaagctgttcagatccgttcataaatcatggggacccttgcgggcccatggtcaaagatggaggggaacgacgttatatgacccttataaagaactattcaagcctgggacggcagatattctaggaagagagcactatgccaacgctgtgatcactgccctcagtcgctatctacccatcgagctggccatctaattcaaacagctccccgatcaagatgccggtatggaatcgtcgtccaagtaacacacatagagtcatcttcctcctgtattctcaacacccgaggacgttgagaatacgtatcaaagactaaaggaggctggtccaacaaagtatcgctcgaggttcgcaccagtggcaaataggaaattcatttgggagatcgagaggtacaccaagcctcccatgacactagaacttgtttcgtggggtataccgcatgaagacccgtcgagacctcgtcaacttctagaatgaatatcgtgtataggatgctcgattggggagaatcgaaaatgaagtcctgccaaatgaagtcctgcctttgctctatctccccagaccgctatctgccctggacgaggcgtttagcgttcttacaagcaagctccttcgaccaaatttattcttcatgagaatgaaaatctccgatatttgcactgacagggagaggtgaggttctcacgttggccctcgcaaacacggtatcaaagagataggcatctggacgaactatttttatcgatctacctctttggctacctatcatcgcgacaaattgggtttgagctgcggtcttcctcacaaacaagctaagcaacgccgcaaaacaaacattgaagcagatcctcgtcccatccgttgaagtggattcggacgggtccagtgatgatcctcaagatgatccattaggccccgagtatttaatcataccttggcacaagaacgctatggtcgatggaaaggtggaagatatataggagcttattcaggagctttatgtgcatcctcatctgcgcggaaaacgcacagtatcattcgtttgtgtcgatcggcagtttgaacttgatcgatcgttcattctgctccaagcagatgagttcaattctgacccggggcatgatttactccaacccttgcccttcccgagcctgagagggttcaaatatacgcgtgcctctactgggttggcatttcttgaggccccaaggcaaaacatgatcgattttgatgcagtggaccatgattggtcaaaatatcgaagaccgggatggccggcacctggggcattgcctgatgactctgtagaggatatagagtagttgacgggagcgcttacccttgaatttaccagtggaatgaatctatggatgacttaagctgagttgtttcgttccaaggttcagttaactactagttacatggttggctacatctgtagttagttgtatgggactatctgcgttgacatgttggcgggatcacttcacagcgcaagagatggtgaaatgaatacgtgtgtaaagaaataactcgaaggatttgatcctttatgtaagagaatgttcaattggatgtcagaggtaagcccaacagacccaatcgacgacctaagcaaatcccaaatttgccgcccacattgcgtgctcgtccaagcacacaatcgtggaatgtggtacagcatccacggtatatagcggtcaggggagtgtatataaaagcctgtgcctgcaattttcttttcgatattgcgtatataaaattttctataaatttaggttcgcctccacgttccgaacttccgccaaatcctatttcttgcgctacttgggtccccaatttcttatttccctcaaatttggaatctttttaaattagattcacagagatttcgaagcatgacgtttagcatagccaaatcggtcctcatcaacccagtcccagctagcaaaagcctcccagacaagggcgaagggcaagaggttttaagcttaactcgactcctgcatcacagccatgttactacagaattcgaccccttgagatttgaggctgccgcatcattgcaattgaaattgcagctcgaggggcaatacccagatacagaaacagatacgcgactcattgcgtcgccctacaacagcgtcccccatctgctggacattgctgcactggaaagacaagaccgactatttgcattggcattggcatatctcaaacctatccgcgacgactatgccaccgctgactacaccgaatcattcaactggaccgaggtgtatgatttgctgagagtcttctcacaggccgaaaaccacacatggaaatcacagtcatactatgttgttattttccgatcaatattgttgccggatattgactcggaccgtctttatgatctcgatgcgcattcgcaccaggaggccattgctagtggcgggctgttgaagtattggtttggggcgaagaatgacaagcatcgaaatctggccacttgtgagtatttgactattctatgttattctgaccacatgctgatcaattcgaataggcatttggcgcagtcgaaatgacgcgagacttggtggtcttggaccttggcatgctcaggcaagagcggccgctgcagtaatgtatgagcagattcggttcactacgctaaggttggatattgcggatggagtgcagtcctggaagctgagttattggaaggaagatgtgctgtaaatagcatcgttggcattagcaagattagatttttgcatttgatgtggtctagaacgacatgacattgtgaacctgtacatctcgatgaatggctaacaacaaatattctatatacgataaataagacgaaattaacgatgatagacacaattctccctctgatggcgagaccaatgaaccatcaaagaagaatgttaaaaagaagacaggaaaagaaacgagcgcaggtgagccggtgatgttgttgatcttgtaactgtttctcgcaatccctcgtgtcttctggcccatacaagacagatcatgccctgatcaatgcaatcaatggagcctatgatagatcggagctaaagtcccctcacttttcaatatgggaccatggaaagacaagcaaggtctctacacaatgccgcggcgggtgcaagaggtgattgagagagatggacgggcttcacagtattaaaacaattgaatacagtgattaataataaattactggcaggataatagtggagaactacgtttgtttcttggttgccctgtagaaagaggacaagttgaaacagaggagtatgcaagcatgggacagtatcactccatcattccagtcagtttagattgtaagcccagtgagccctttttcttggcagagttattatgattccacaagggcggacgcacttgattcgcaggagaatttatctctggaatgcgttctgtcgtaactagggatcgacataggcccctagatccacgaaggaactctttgctcaaggaaaagttattttgttataatcaaggcgagctcgtaagacgagcatcttatttagaccatcttagctgaagaaagcaaagtttgaattgatctacaagagaaaaaaaaaaggaagataccctgggagtgtaaacatcggcattcaagtactatataaatcctcattccaaatgacaagagactggcatttcggtaatttcggatcgcgtatccgcgtttcagacgttaaatcttataatagttgtgaacttgagatttatctgtttccaattagtgtcaggaaaatatctcattttcaagcatccactttatcacaacatacgcccaaattcatacaatatgtctcaagttattccaagggcatcatggctctcactcatcgtggtagcactgctggcagtctccactgtcaacgcacatccagtccaccaggcagacgaagagatggaaaaaggacacaccggtaaacttgaatctcgatcaccggttagtccctcagacattgcattctgccattaaaaagcacacttctgacagaagtatagagacttattccagatacccagaagtacgttcatgacatcttgcaagggttgggcctggaagagccaacctcaacctcaacctcaaccttaacaccaaccgccacgcccactgccagcgtcaagaccaagcaggactcggagagcatgaattcaacaaaaaccacggagattacctactccagctctaccagttacacacccacttatagcggcaattcggcaagctacactcatactgtgaagaacgtgcacagctacaacaggccagtggagaacgttcagcttgggcatggttggaatggggataagaaagttactgttgatgatctcccagctgcctttgatgctttgtataaggtattggagcatcgattgaaggatgcaattgacagctctgatgagattggattggatgaattcctgtgaggatgtttagtgctacgaaactcgaagcgatggattattgattctggaaaatgtgaacttcaagatatactatgtactactaatgtcgtattaggaggctatagtccatgactgtaataatatcgctactccctacattatcggtgttccctaaactcccttaactccgtgttccgatcccaactccggaaattagcagtacaaatccgcaggtgatgccggtaacccggacgagaagttcgatatccaagttattaacatgatggtttacattgacggagtgatcgcacgaagcttgcggtgaaaacctgtaactacgatcaatcgatccaaccccgacggcggggcatcttgaaccccataaaaggcccatcgcagcccgccaacctcgactttctaccaactatctcttctcaacaatttacgcttatcatttacattcaaccatgccttctatacttggaaaggaagtcggctctattggctatggcacaatgagtgcgatccccctctcaaacacccacaattggcggacacttcgctgattataaaatcagggatgacctggaacacgcagcctccatcagaggaggtgtgcttcgagacactcaacactaccctggaattgggtgccaacttctggaacgccggcgagctgtacggcactgcagattacaactctctgcacctgctcaacaagtacttcaccaagtaccccgagaatgcagacaaggtcgttctcagtgtcaagggtggcttgaagaagggcgagcttgccgcggatggctcggaaaagaatatccgtcgtagcgtggacgagtgtctgcgtctgcttgatggcaagaagaagcttgacattttcgaatgcgcgcgacaagaccccgcgttccccgttgagaataccataaaggttctcgcggagtatgttaaggagggtaagattggaggaattggcctgagcgaggttgatgccgagacgatccgccgagcgtatgtgcctcttgattttatagtcgtcgtcttcctatggacaaactcaactctaactgcttctctagacaaaaggtgcacccgattgctgccgttgaggttgaaatgtcgttgtggtccaccgatatcctccataatgacattgccaaaacctgcgcggagctcgacatccccgttatcgcttactcgccacttggccgaggtgtgctgaccggagctgtgacctcgctggccgatatcccccagggtgattttcggcaccacatgtcccggttccaggaagataacttcaaacataacctgaaactcatcaacgaggtcagtagccttgctactcgcaagggtatcgctcctgctcagattgcactggcatggatccggaccctaagtgagaagcccggcatgcctactattattcccattcctggcggtactacgaaggacaaggtggttcagaatatgggcggtgcacaggtgctgacggattccgatatggctgagatcgatgctgttttggaggaacatacggtttctgggcctcgatactaaggagttcctgcatgagtttttatatttattattagagatagatcagaaatgtgatatgtgcataatgccaatgggtatttgtataggtcagatcaagtgtagaagagtcaacatacaatctcacattaataggtgattgtcaatattgtataattcctcggaattgatcatcatatagtatgtaaggcagttgagaggatccagtgttgcgtagaattcattatatagggtagtgcgcagggcgaaggcgagcttaccattgggtcattgtgatgtactaatagagggggtctgagtattactaaataaatgaatagcatgacagagacgaagattatgatcaacgaatacatataagaccatggaggaagaaagagagggagattagcgttcagttgtgacctcgcagtcgatcacgtgatcccgttcatccacggctgaacacgtgatgtgatacgatggcctccctcgcgcgacatctacagtgcagctaatagacagttcaaatttgtttgctgccacttccattttcctatacgagctatgccatccacaatggcttcacgagactctcccggttcccctctctcctcggtgggatccctcgagacttcagatcatgaatccatgaaacatgaaagccgcgcgcattctccctcgatgtctaacatgccgccatccaagcgtcgtcgcaccggtggcgcatcctgggaccgtcaaactcctctctcctctacccatgacgaaaaccacccacctccctccccgactgcctcgatctcctccgatagctccggcgatattcccaactcccctagcatccttaccctccttggtaccaatcaagaagatgactacagcggccaaagcaccgaccaggttactatttgccgatgggatggatgcaatgctggcgaccttggcaacatggatgggttggtgcagcatctccacaacgagcacatcgggagccgacagaaacggtactcgtgcgagtggacggattgcacccgcaaaggtcaaacgcatgctagtgcttatgccctccgcgcacatatgcgaagtcacacccgcgagaagccattctactgcactctgccgggtaggttgtctcagacccagactcgagcaaacagatctcgagtattaacaatgaaatacagaatgcgaccgcaatttcactcgctctgacgccctgaccaagcacatgcggtctgttcacgagactgacactatgcgcccgatcgactccatctcaaaagtccacggcaccccgggcagcactactggcacccctgcctcgaagttgcaacgcatccgcttgaagctgacccagcccagggagccgggaagtgagtctgagccacacaccgaagcaatcactattgtgccaactcccacccccatcataaccgacgcacacgatcccgacgagacctcgatgccagagtttggcccggagctcgacttcgacgaatcggagctcgccctagctccgcgcgacctctaccgtcttctccgtcgacagatcgcgtgggctggcaaggaggccacacagctgcaagccgagtgggaaataattcgcccgcagcgcgagcaagcatggcgtgagaaggaggctatctttgacgacctcattgacgccgagattggcttgttcagcgcaatggtcggctcagtaccccccgtgcacctaacgaccagcctcgaaaagttgcaacagcagcaacagcagtttcagaatcaacaggagcagctggccaagtcggcagaggtgccgactatcgagggcagcacttagttggcttgtcttccctttcttctctcttttctctcctccccctgctttgctcctcctttctctcaaccttctctcccctgagaccatgctttggtagcttggtctcagaactgtgtcactctgtggtcaccttttcatttgtaaacctctcatatcccggcgtgcatggctttggtgaatgcgttgtgtattttcaacccaagcagaaaagaagtgtcctgcaacggaatgtatgaatagcctcatttctttctttatttctttcggtctggcttgcaggctcagtgacagctcaccactatgggcgatcactacaattatcaataatcaagattttcttctgatctgggaattataatgcaaggctacatagcagacagaggccatgtctagtcgtcaatagagacctaagttttaagacactgaagaggacgtagccctgactccgagtgcctatcgaccctgaagggcaagtttaagaagtcattagaaggaaagacatcaaatggcgtgccatgttgagatgtgttgagacgtgcggtgacgattgcgcaattccatcgagttatacgtgacgtttctttaagtgccagtgtcgtcgggactaactatatagcttatattcctaaacttatttcttttcttcttctctgttcttctgtatagataatctaagagctatgaagaatctaactgctgatgagcggtaccaactggcaggagactactttgctcctaaggggctctatgagtacaccaaaagcctacccttcactggtcgagtaaaaagtaatgttaatacacttgtggccggggaatggacggagatcttgctagactatgaggttggcgcatcgggcctagcagatggcgcttggataaaggccaccttcaaattctactcggtgagtgaagaagcccgatagagcaggctgcagacttgatccaacatgaccgagataggattgggtactgttccagacatcagatcccacaaaagacaactatatcagcgccgagtatatcccaaacagccttttcccagaacagacacccgcgacagttcaatccctggccattcgatttgatcaaaagggacacgagcgacctttccaaaaagctgtgattgtggatattcaagatggctatatgaacccaggcgatcggattctgattcgactaggtgatcgtcgcttcggcggccgaggaacgcgggctcagacattcatcgagaaagacttccgctggaggttttacattgatcctgttgggactaggtgagtagtattatgacagcatcacagcgattgaatctggtgaaagctgactataccgccatagtcgctttgctccgattcagcctgacctctcttggaacatcgtcgctggtcccattcatcacctccaaactgtttctcctcgcgtacttcagccctctgttccattttccattcattctcataccgaggatatctggggaaatgtgactagtgatctcgagaatctttccttccagctgaaggtgctagacgaagaccggaaggccatgatcgtcaaagaaagttctgcatcacagcaaggctggacgaatgttctctggtctcagcatcgaagttgacggcgactacaccattgaggttatcgttaaatcgaacgagaaaaccattgtatcccaaaccacccaactcaccatttcatctggtctctcagttcccaaggccctcttcggcgacttgcacgtgcactccgacgacacagtgggaaccgagtcatcaatctacaacttttcctatggccgagaaatcgcagccctggatgttctaggatacaccgccaacgacttccaaattaccaaggaacgctgggatgccacaacagacttaatcacatcgctcaataagccgggcgagtttgtcattttcccagggaccgaatggtgcggaaactctgcagcaggaggagaccacaatgttgtcttcctggccgatcccgctacacacccgcccgaattccccttcgatcgccatgggaatgttgcccgttcgtttgaatggtccgagcatggtcccaaggacctcgtccccggagcttggccattggatgaggtatactgcacgtatgcgcgcaaggcagatgaccatatcctcattccccatgtcggtggacgccggtgcaatctggcatggcatcatcctaagctcggacgccttatcgagattgggagtacatggggccagtttgagtggctcctccaggacgcagtacgcagaggatggaagcttggagtctctgctaattctgatgagcaccgcggtcgatgtggtggcggtgttcctggcacagcagtgttcggcacccgaggcggtctcactggcatcattgcccccaagctcgagcggcgggatatcgctcatgcgttgagagcacgccacaccttcgcaaccaccggtcagcgactagtaggactggtccagacggcggaccagtctgctatccagggtgacgaaatcaagattgccaaacaagagacactagagctgaaataccagttctttggtgagaagggattctcgtcaatagaggcttttaatgaatctggcctgatctggcgaagacatttttggtccgagtctgacgcacccgccaccattctgcgggtgacatggggcggagcgagattatacgaccgctatcgtgaagctgtttggaacggaaccattacagtctcagataccagcattgaggatgttttgccatttggaggcttcgaggacaacgcagaagactttgcacgccaggcgggagaaagcaccgttgaattttcaagcaaaaccagcggggaccttgatggtgttcatgttgtttttcagggcaccaagcccccgcaaaaaatccgtatcgcaggctccctcggtggatatgtcaaagttggagaccccttggctggaaacccccacaaagcccagcctacattcgagctagaggcctcttgggaggaggccaagcgcctagatggaaaggtcatcgaaatcctgggtggtgcggagctgtttgtgcgtattgaagcaatcccgcaagtggagctgccacggcgggttcagggacaagcatcattcttccagacaggatcacgctcgatatactttgttggccgagagtggagtggagaaaaggtggtgaccagccctatttttatagactatgtatgaggctaaggttctcggggcttgaaacttggacgagatacctaaagtcctccctgtaatgtcagattgctgtatgccgtagtatattatatgtaatggtttacagatatagttgtagtcttgaatagtaattcatattgaggctaaaatgccctgttcttacgttggctccaagataaaagtgaatgtcaaataacaccccactgaatgatagcaggaagataaggaaatcagtcgacgccattacagccactccataagatacatgtgctgagagagaaaacaaactgcccttgattacggatacctccataggtagaagccctgatatgcccacgacatacaagaaaagcaaactaaagcaaaggagatatgatatgattggctctatccaggcaaaaaaaataccatagagaaccagtccaaaactccccaacaggaaaacatagaaaataaaaaaaaacctccagacaagccatgcagtgatcatccaagaccgtgctcactccaaaaattcttctttttgtgctgttggggctcacgcaataattcgacgccatttgcaatgccatgcaacaggttgcatccgtatgtacctttaaagaacaaggagaaaaagagagagacgaaggtcacattgataggggcatctcaaggaattgtgcgagatgttagaacatggtcaataaagactccaaaatgtcgagtccaatataagaagattgcaggtgggtacaatgtagtggtagagggagtagagatcgccaaaaaaaaatacgctgagtgtctatcataaaaaaatgaaaatgatagatagatatttgatatcagaaacgctgaacgtgcatatcatcaaaccgtgctaaagtgaagttgaactgaaacaaagaacatatgtacccattgagatacggaactcctcaagccgagctaccattagaggccttggaagctttactggcttccatgaccttattgaacatctgctgcagcttagcaccactggcatctttattcggccagtagttgagtgaaacataatccctgaaagtcaagtcagaacgggaaaagagaattgtgatagcaaagagaacttaccagagtcggacctctagggagggcatcgattgcgagccctccagagtattacgaatgaattcgccaattttcactagggtaaggcgaagtttctgggcccgctcgtttttgcttgggtaatttttggcagtgatcattgccacttgcttcaaattggcaacaataggcttgaagaacatgaacgccatgtcttctttattagagccgccgttctcatgccctttgcggcgacgaagctcgtcattagaggcatcggataaacgatggcgtggacgatcatcaaggccagatcgtggacgagagtcatggctgggagtatgatgacggtctccctccctgctggcatgcgtgtgggggcggggacgtgatcgatcggattcacggtggcccttgcggggattctccggcctgcgagaactagagggtgccggagaggcggagacactgccactaccggaaacccgtgagccacgcttgttgttgcggtggtgattgtcgactgcccttctcgctgtagcattgttgttgtacttgttccttagaacagacatgagatattcagctcgtcgaacaaggtggacagcgcccggtgattttgtcgccttctcctcagtctgcaggcgctgtgtctttcgctccactcggtgttcctcgaggaagaatttgtcgccaaggccaagctcagtgtcatcgcgaatttgggtccacgcaccaaacccatggcgtgcgatgccgacaagaagcattccgtcttcacgtgcaccccattggcagctgtagtccgccaatttggtagcctcggggagtcggaatgtcctgaaatcagccaatgctttgatgatgcttcggataaggcgcatatctggtggacgttcaacgatagtccatgcattgagtcgcttgactccgtgatggtcgaacaagacggccttctgttctttcttcgtggggtttctacccgattgtttcatggcctctaattggtccagacttgcttggacaagcgagtttgccttggcggtgatttcatgaagagcatcacgaacggtgcctcgatcgcgagtttgtaatctggcatcctccagaatgagatcttcggagtcatccagatcgccgtaacgaaggaatgctcgagaaagtgcacggtattctttttctccgaggggacgcctgggatccaacgagggactttcttcctcgccatcgtcgatattgacttgagctcttgcgagccgtttcgccttacgttcctctcgtgaatctgtcgtgtccgtgggggcgtggcgcttgcggggtcgattttgctcaatgacttcagcaagataatggtcatcatctttacgcttttcctcggccttgagcacttcgagctgttccttgggaatgatgtcgtcccacgtgagatcgtcaactttgatatcgacgaagtcaaacgctttcaagaattcttcaccgccgtcggcttgaatttgctcagcctcttcggtttggtgtaattctgcgtttgcaaggacggaatcaatatcaagctgctccagcttcttctggttgtcggtttgttcgaacatcttctggccgcggcgcttgaggatccgagagatatcatctgtggaattaggctcggcaaccacacgagccattttgttttgcatctccgaggcttctttgtcggtgacaccacgctggatggtgatgaactcgagcaagagcttgttgcgagctctttcaataacttcttcttcgatcgtatcctttgagacaagacgataaacgctgacaggccttgtttgaccgattcgatgagcacgcgccatagcttgcaaatctgcctgggggttccaatccgaatcgaacagaacgacagtgtctgcagtcataaggttgataccgagaccacctgcacgggttgaaagaaggaatgcaaagtcggtgctaccgggagcattgtaatgctcaattgccaagcgacgggcagcggacgggatagttccatcgagccgttgatatttgtaaccacggtactccatatactcactcaggatgttaagcatgccaaccatctggcagaagatcaacactcgatggccatcaacgctcaacttgcggaggagttgatcgagaagcatcatctttccactgctggtgatcatcgctcgaagaatatcttctcgacgagtactaccttccaggatctttgcttctgcgttggggaacataaatgggtggttgctagcctttttcaattccatcatgatgttcaaaagagactgcttcatccccttgttcccgtcgttgagcgctgcgtagtttttggtcaagatattcttgtagtattctaattggacatcggagagctccactcgaatgattttctcagtcttcgggggaagatccgactcaaccttggacttggtacgccgcaacatgtaaggctgaatggcggtagttaattccgcgagtttttgagacgctgcctcggaattcaaatccatgtcgacgtcgacttcaatgaggcccgggttgaggaaatccattaatgctgaaagctcagcaaggttgttttggattggggtaccagtaatcaagaggcgtgcctggcatttccattcgaacaacttcatgtaaagttgtgaatcgcgattcttgagacggtgcgcctcatccactgccatgaattgccacttgaattggccgaggaagggtgagtcattcattgcatactcgtaagttgtcaacagaacatggaactttggacgtttgggattcccatcgaccatcaattcataatcgcgcaacacggagcgcgccttttcactaccattgtaaacaacgtagttcagatccggtgtccagtgatcaaaggtatcagcccatgccggcatagtagacagggggacgatgacaatgaacggcccttgctgccgcctgacatggcgcatccagttgatgaatgcgacagtttggactgtctttcctaggcccatctcatctgctaaaacaacattgcgacccctaacccaattgaaagccaagaagtttagacctttgacttggaagtccttgagttctccattctgcaagaaagtaggggttccgtggatgggctcaaaggatttacgcgtggcgacatttatctcgttcttgtcggagataggttgtcgagcggtgcggtccaagaatcggtcaacctcacgctgtgcgatctcagaaaccagatcctctggctcccaagtacaggaatcgtagagaagacgtttccatttgacaaggtattccgtggtaccatcctcgctatcacgtacaccaatgacccgttcaacctttttgtagtcctctatggcctcgacgtctcgttcgcgatcgaggttccacttttcgcggtcttcaggaggggcgtcgacactgtactgcaaccgaatatcctcattgagtaccttccgaacataattatccacgcgtcgcgtgctgcggaagttggcaatagattcattgctttcccatgtagcatgatagtgtgatttgtcctgccacttgatacaaaattcaaagtcgttgcggtcgagatcatgagctttggggtcgacgccctccttgaggcggtgattcaggacgacgtcgacagcggggcgagtgtcctccacataactctccgcccagtagttttgtggaagatcttctgggtcttcttcaaacatggcttcgtcttcctcgtcatcctcgttgtaatttgacaccttcttagcggttcgcgttgagaagcgaacctcactcaatgaaggctcatagctagcagtttgttggagacgccgccttctcgctttgctggcacgagcactctttccaccatactcatcactgtcagactcggacagggacgacacagtagccgatcgagaggccttagatggttgctgggatggatctttgcgccgacgcttagtacgtggtgcaacatcatctgagtccgaatcagatgagtcggcgagatggcgcgtcgtgcgagcacgaccacttcgtcgaagcccatacagatcgggattttgtctgatcaggtcggtctcgctgactggtgacgatttgcgcttcgcaccgcggtcgggatgaggagatgaagagttttcacggctgtatgtgttggcgtcataatcgctgttgtcctcagctacgtcctcattttccgcgtccgaatcggcagacgcgccgtcataggagtcgtctgcggcatcgggttcgggggaggactcggagacggggtgggactccatgggctcggatggactgcgctcatgttgccttaacgtatcgccatccgcgtgggtatcgtccgcgacgggcgagagagggtagccattagacatggtcgaggtagaaggaggttcctgagcaggtgggatcaccatgccagaggctattaccgaggggcagtcagcattgaagcttgattcgggctaggagaggcatgaaagagatagggacgggtaaaacaatggcacgcgacccaaattgcggtcaaattgagcctaaaatctagcagaatgggacaggatattgacttcgatgaaagagtatgttttttgataacgggtgggatggacgcggccaggctggaaggcaaagcaatggacagattgatacacacaaccagactcagagaaagcagtgacacgctgcttgaccgacgacaatttaaacctgccccaatcggaatagaatagaggcattcaaggattcgtgcagtgggtcgacaagcgcggagaagtaccgcggcgaatgcttcggtcggcacgtctgtgcttgaggaaaagattaaatcacttacactccatagcgtggtgaccccgaaagcgggggatctgtcgatcaatgtgggaaagtaaatggtgggggggaggcgtgaagctggaaacttggggaggaggagacgagagacttggaagaactaagagttggggactgactggagggtttgcttcggtttggtttgcaggaaagtagacacccgatctattaggcatcaatagagcgtaaccctattgagactagcttattcgcttggcgcctggcacggcgtcacatcacgtggctagcggagctcggagaaaccaccaatccgaccccaggtcagtagccaatcaccgccttgataaataagtgacggatgtgtggcctaaggcatcacagcccacagaaagcaaagcaaagtgcattcaattctgccgcccctcgttcgttgatagtagtgtttcttcctgtcttatttctagtcgagtctgcgcagagatacttggtgcttttgctgagcccggttcatttacctgcgacagcgcttagtcggccaatctcaaccccccgcccctccacttggtgctgattttttttttttcaatccgcttcatatacacggtttctttgaaccacatccacccaccatgtctgacaagcttactcggtatgtttatggagcctttgaagtgcgatatcaccagctaacggtatacttctctttatagtattgcgatcatcaacagtgacaaggttcgtcgcgacatacccccactaataatattttctccccggttcatgaataactggctcacacctcatctttccaactttacagtgcaagccgaaggtacgcgattcgatataatatttcattgtgctcagggaggctaattagttccagaaatgtcgtcaagagtgcaagaaggcttgccccgtggtccgcacaggcaagctctgcattgaagtcgatcccacttctaagatcgctttcatctccgagcgcctgtgcattggttgtggtatctgccccaagaagtgcccattcggagccattcacattatcaacttgcccaccaacctcgagacccaagtcacccaccgctactcggccaacagcttcaagcttcaccgactccccatgccccgtcccggtcaggttctcggtctggttggaacaaacggtatcggaaagagtacggctttgaagattctcagtggcaagctgaagcctaacctcggtcggtatgacaaccctcctgactgggaggagatcctgaagtacttccgtggttccgatttgcaaagtaagcaccatagaccaagtacagcggtctttattcgaagttgctaactgtgacagactacttcaccaagattctggaagacaatctaaaggcggttgtgaagcctcaatatgtcgaccagattcctcgtgctgtgaagggacctattcaacaggttcagcagcttatctcggggcgcgctgcgctgggtaacgaggaggagattatggatgttctcggtgcgttgacatgctccaatatctcgaaattcgcttgctaatcttcgtccagagttgagacaagttgcgcaccgtgatatcggtcacctttccggtggtgagcttcagcgtttcgccattggtctggtttgcgttcagaaggccgacgtgtacgctcttccttcattagaattgatgccattgaatcctttaggttactaataattatctaggtacatgttcgacgagccttcctcatatctcgatgttaagcagcgtctggctgctgcccgtacaatccgcagcctcctccgccccgacgactatgtcattgttgtcgaacacgatttgtccgtcctcgattacttgtccgacttcatttgtgtgttgtatggtcgtcctgcagtttacggtgtcgtcactctgccttcatccgtccgtgaaggcatcaacatcttcttggacggtcacatccctaccgagaacctgcgattccgtgaagaatctctcaccttccgtcttaccgaagcgggcgaggagtttattgcggacaaggatcgtgccttctcctacccctcgatggagaagactctgggtgacttccacctgaagattgatgccggaaagttcaccgactctgaaattgtcgtcatgatgggtgagaacggaactggaaagaccactttctgtaagatgcttgctggtgcattgaaacccgatggcgctatcaccatccccaagatgaacatcagcatgaagccccagaagatcacccccaagttcacgggtaccgtgcgccagctcttcttcaagcgtatcaagactgctttcctctctcctcagttccagaccgatgtctacaagcccctgaagatggatgacttcatcgaccaggaggtccagaacctgtccggtggtgaattgcagcgtgtcgctattgttctggctctgggtatgcccgctgatatctacctgattgacgagcccagtgcctacctggactccgagcagcgtattgtcgctgctcgtgtcatcaagcgtttcattatgcacaccaagaagaccgctttcatcgtcgagcacgatttcatcatggccacctacctggctgatcgtgtcatcgtcttcgacggccagccatctgtggacgctcgtgcccagacacccgagtctctcgtcggtggttgcaacaggttcttgaagagcttggatgtcactttccgtcgtgaccccatcagttaccgccctcgtatcaacaagtacaacagtcaaatggaccaggagcagaagctggcaggcaactacgtaagttttctaagttttctatctcatctatggatgctattgattccattctaaattccttgctaactatattcaacagtacttcttggaagaagagaattgaaaagggcgttcacaacgagcatcgtcgccgtcgtcacaaacatgacggccgcgactatgagcagcggcgcaacaggcgccgcggcgattggaagatcatgtggttaatggggatcccaggcgtttgcagagcctcggcggttcagggcaagggataccgtcgccgcgccggaccctcttcaggtgccgatgacggtctctcggacgacgatggcgatgatgacgatttgaatggcaacagtgaccccgactagaaggtagtgacctggttcacaccctgctatccctggtctagtacgctcatttacttatgcgacctgttgccattcgtcagtctatcaacaaatgcctacatcgttattcgccttgcgacctgccttgatttgctctggatttttttatcatatccagagtcatcggcccccggttgggaacacatgcctacagatcttccactagcacctattaaattttaatggtggatgaggttcggcatagtttttttttccaacggagttatgtttgcattaggttggaggggttgggttccaaaaaaagctctccatgaattttatgatttgtttaaagatggaatgtcgcgtcggaatggattggcgatgaggttgttttcagaccggggatggcatagaacaggaaaccgctgaaaagctgccaggttcgttgcctcttcgtcgtgtagatagatagttttcaacccattgttgtgcatatgcttctcttgttcgtatttttgatccaacatatctctctagcaggcttctctagccacgcgcaccccgaattctacgaagcagggacactgccgcctttccttttgggtcgaggtagccatgtggataggcaagtatgatatatgattctgtagatatatatatagagagagtaccagtatacaagcattgtgtacaggagtgtacggatatatataatctgggagaaactggccatatcctgccagggagtcaaacggacaagtgggatctgacttcaactctttgagctatgtatgtactatccacggggagactataggtacacattggggttgcggattatttacctacgctattcgcgggggcgagccaagcccgatatatacaaaccgaaagaggttccttataatttgataaagggcagcatctgctagaagtgcaattagtgcggcattaggagagacattacgagatactcaaatggctcagaccctaacttttgacattcacccaagcgggagcgtgagctcggattatctggtgtgcaagtcggagtagtagatggtctagactggattactgggcctggaagaaagcaaatgagattgcaggatagattcagctcaatatcctacatgtgggttgaagggcagaaattacttgcatatggtcaagcgtgaatgagaatgtccatccccatctactcctcttcaatctctccttcctcgctgccagagtgaatggccttctcatctttcttcgcatcctcgatctcttcttccggaatagcggaccgttcctgtcgggggactctcggacccttgctgcgctcacggctctcacgtcggtaccgcttacggctagccacactctcggtatcactgtcacgtcggcgtcggcggtcaccactggccacactgcgagtgtcaacagcaccagtaccaccaccataatcaagctcatcacgacttccacggggatctccacgagtgcggtaaaggcgctcgcgttcgtcttcacgtcggtctgggtctctagcgcggggacggtcaaagtcacggtcccggctacgataacggtctccacgctcatcgcgacgatcacgagatggggagataccgctgaccttgcggtaagttcgttcgcggtcggcctgtgccttgcgacggtctgcttcgtatgcatccatttccggggtccggttggtctggccgctgggtcctcgtcgttctcctcgcccactgcgatattcacgatcaccgcggtcataatcccgtcggcttccacggctttgagagtgtacctcacgctccctctctgcatcctcatctctttctttcaagcggcgaattgctttttcaaaggcagactcccgaatttcatcggactcaatggccttgtattcgtcgtatttctcaaggcgaggttggacttcagcccaggtgtcggtgacccggacaggcggctctaggcgcttgatacgagaacgcagtgcgtccacggcgcgacgctgttgacgatcggctgcatgcttttcatcctccgtacgtcgaactgccttgtcttggatgcgctggaaaatgagattgagaatctcagggtcaatcttggaggtgcgacggtcggcggacatgatagaattgaattcgtcaaacgtggtttcagtcgtaacttcaaatcgcttgtcctagaatcagtttgttaggacatatagtctttgcttggatccgagggaaacttacatccagaacatcgagcacgtcgttccgaggtcctcgcaaagcgcgttcttcttcctccaccatatcccagaacaaatcaagaggggtcgaaccaggctggcctaggatgccatgatatctggggtcatccttaatgatcgggcagatattcatccacttggtgcccgccttgatcttaccctgggatttgagctccttaaggagggccacgaattgctctcggttcttacgctcctttctggttctggctgccttgtgttgctggcgagcatcgttgaaagcccgctccagggacttgatatgattttcgaaggcaatcaaaatgtcagacttggtcagggatttgaacttgtcatcggtttggaacttgctgtcagactgaatgatggcatgagcctcggaccaacgcgtgtatggctccaggttgagtgaatccataatggtcatcaactcatccatggcagccttgtgcgtgacaaattcttgctcggcgtgagccttcttgagttcgaggatgtactcgtcgaaaagctggcgtctctcgtcttcctcattggtagacctgaaggtagtctccccctcaatgatcggtcgaatcgtcttccagcggctgtagtattttatttcaggatggcgcttcagcatagtgttgaagtccgcgcgaagcttggcgaatcgttctttcgcccgctccttttcctgcatgcgaacctggaccacgtatttctcgaaggctgccttgcggtctcgcggatccttaagagcccggtactgcgggtccttgatcgtagcgcgcattgtcgcgtcccaagtccaatcaggctgcacgttgtggcgcttgagcagcttcatgaaggcgctctccgcctcctcgagagtatgatagtcggggtccatctgggacttgtattctggagcagcgaccatgctgttcgtttcaaacgagccgtatccaccgcgtcggtcgttgtatccccgctcacctcggtcgaagtcttcacggtcacgttgctgcagttgcgagaaagaggctccgccggcgacaaatgaaggggcactgtgaaggaattggcattgagggaagttaagttggggaagcacttacgcgggggtcgcctggggggcaggcgcctgtgcgagcgcgtttttgtaaacttcaggcatctcccatgtgctctgcttagtttctgagtgataccagtatttgcgcccagcatccgtagtgtgctccttccatggttgattcgcgagagcaagctataaagaagtcagttaagcgcgtaacattttgcggtcaggtacgcacctcaaccggagtcatcaactcttgcggcttggtccattgtgtggctttggtctggatattgtaataataaacgcgtccttccgcattttgcgcctgctgccacagggcagaatttgggttgcggcttggatccattgtgaacggtgttgaagagactaacagagaagtgaaaacggagcttcctcaataatctccgcggctgtgcgcttttggcacttcgcgtctaccgtatcaacacttatcggttatctcctgagctctaaacagccactttattgactcctttgcgacatccgttgtcgcaatgcctggtctggagatcccaggtgaattcttgcgtcatgcaattcttgataccgtcgtgcttcatgctccagcatttgacattgagcgcgccctgagttcggccctagaggacggagctgatgatctcccctctgttctctcgtcaatcccccaacggtctctattgttctttggtatgcactttcaaaggatcagcagagtttgcgccttactcattaatagcaattagatgaatttttgcctgtccgtatcatcttgagactatctgattgctcagaaacgaccttgaaacactacctgccacgactcgaagtcaagctcgatgtctttgctgtcgatccagcagaatcagttggcgaaaacctcacgccaactcgcgatataatattctcaggaattgtcggtcgagatgaggatcccctagtagtcttcaatgaattcgaaggtgatgaaggcagtgggaatcatgtctatttggtttggaacatcgagactatactgcgtgagtgatttgaatctttggattgacatgaacgtcactaacttggttgatagggcgtccccgtattcgaatccaacatccgtcactcttattcattgcgtctgccagtctgaatccggctgacgctcgccgtcgagagaattcgggggatgactatctcccctcactcgtccccgcatcgaccaatatgctgcaatctctatccactgataaatctttcaatcataaagagcctttcctccccgcttccagactattgagggttgtaccgacaacatacgacgaagacccgatttacaatatccagcaacaacacggtcacccctttcgcgttgtgccagccgcaagcgcaaggattcgatactctcggttaagctcctacacggctataccgatgaccgtggccagtcttgactttgaggtcaccccttatctggcttgcgaggtctcctttgacaaagcgaatcttcacctgtccgagggaacgattgagtcgctttcagacacaccgggcctggctcttcctattacttgccgtccgcgagacgatgtgaccctcatgtataaacttacaccggagtatggcccagagaccaatccatcatctaccgcgttagtcagcacgctggacatatctctcgaggcagcaattcttgtggatgacgactgcaagccacgtatttctatgcagtggagaaccaacgtcgatttctcagtcgccctaaatccgaattttggggggcccagtccagcgctgcaaaggaccaaccgccctaccagtctatcggtgtcaacccaagtgggtgtgaaccctcatcgaagctcattgcgagaacgagcatattcggtcaccgacgtgggtatcacaatctcattctctggacctgttcgtgtgcaagtgggctgtgtcttctcttgggatgtttttattgtcaatcgatcaaacgctcctcgaaagtttgccttgatcgccatacccaagcggaaaagcgtggacccacgaggccatgttgctcggccttcatcgtcatctatcaccagccggaaagaggaccaagtggccgaggcggtaactgacgataatatcgtgcatgcgaggcaaaagagtgtggctggtcaggaagtggaactgatcagcttgagcacagacattcgcgtggggtgagtattctctactgtgttccttttcgtttccttctctaagctgacgttttattagccccctcctcccaggaacttgccattcgactgaactcaaactccttcccctagctacaggcccacttcatttggaggcggtccggcttgtagatgtgaacacgaacgaaacgactgatatccgagatcttccggacattttggcggatgatcagcctcgctctagttaagagcagcctaacactgtatatatatgacatagagctatagctactttcaaagtggcctgtccttaacaaattattttcctcttgccttttatggtgtgtttttaaggctgacaactcattcgagagactatatgcgaccccatatctagtttgtaccttttcattgcccggtatctcctgtttagtaactgaactgcgatcttgaaacgccaagcgcctcgaacggcgtgaaagcattactattgctccaatgaggcggtgttaaagaaagatagatagaactgttggaatcggctggaagatgaaatggagttatacaatacaatttatatccacgaagtcaatgtatacggggtaggtgtagagtaaatacaccgaggcagcaaggtatagttcaacgaatgtgattggtggaaggagatcacggggtaatcgactcggcgtcgtgactttgttagtcacaaaggcgggaatttggagaaggccagctaactacatagttatcttcttccctacatatcatcatagtaactgggattcccttctgaatattgggtattgggttcaatatccagcttctcaactttgcttttcaactgccccggtttctttggtctttgcgtcatactggcgcatttggttccttcccagaaatcttgcccatcactccgctcccagtcgccagaaccctccaacatgatctgctctgcgaagcggaaagtcctggatggactgaataagagatatatttacggtcgcgtggtatgcaccttcctaaagcctgacatatcgtcacctctcaatttgattacggctaaccctgtggtcattatcttcaagcctttattgcacacgataattttcctcgtcgagatggcagtagcagcacgccttgctaccaaattcaatacctattatgctgaaaggccaggtaagcctctttccgcctgttcccgcgggatcacagactgacatcactactgtaaatagtgctcacgaccatggtcaccaacgctgtaagcttgccgcgatattgatcaccaaagtttggactgacagctgactaaatggatgttacaggtgcttggtggtgttgccgataccgttgcgcagctgattacggccttccggacccgccgatcgcagacaagcggggacgatttcctatcgatcgagatccccgactttgacaagcacaagccctctgctgtaggggaatcgggatatgttcggagctcattgccgcctttcgattttgagcgtctgacgagattcatggcttatggcttcttcatggcgccgctgcagttccagtggttcggcttcttgtccagagcattcccactcactaagaagaacccgacggccccagctttcaagcgtgtcgcctttgaccagttaatttttgcgccatttggtatgatccgcctctagctactttgggatgtctttggaccggactgatttatctaggtctggtggtcttcttcacctacatgacgatcgccgagggtggtggtagaagggcattgacaaacaagttccgtgatgtctacctgcctaccctaaaggccaactttgtgctctggccggcagtgcagatcctaaatttccgtgtcgttcccattcagttccagatcgtaagtctcctaagttctccttgttaggatagaacccatactgacttctcaacccagccattcgtctcaaccgttggtattgcatggactgcatacctttctctgactaactcctccgaggagtcctaattgaacgctattcaacgcgaaatcatgataacgattcggggtgtagaatgcttgaagtacactctttcttatgtcaaattatttgggagtttcggttggtcagtctggctttcatgtacatggttgcccgcggacggggtttgcatttcaaaaggtcagattttgcacatttgggaataccaactcggggttttgctgttaactatttttgtgatttgacttgaatgcttcaggagaattccatgtttccgcttttcagcttttcaacccccattgtgcttcacatgatttcgttggactcggaaaacacgcaagcatgtacggagtagcgactatggaatcagtagaggtaatcttcccagaaattcccgaccccgaggctaaagagggcctttatggcccggccttccccgtatcaacgcgggcagctctgacatcagtcccgcgtcagcccgatcagttctccggggagagtcgggtacgggaaagtgaggtacctattttatagagataccttgtaaacaatgatggcatcatagtgcgaacaagtaccttattcggtggaatacatcacctgtaggtaccccgttgctacgggggtgccttttcaccggccttgccccaccaaaactgacccctccactctttaatgatcgcgagctcaccgtggcctgattaagttctttctccttcttcttcttcttcttcctttcttgcttcttttaccattgtcatatcattagccatccaaaatgtctctcgccaacaagctccccattactgatgtcgacctcaagggcaagcgtgtcttgatccgggtaagcttctagctcattgagcttcattactcgcagctcctaaccgctgactgaaacaggttgacttcaatgttcccctcgatgataacaagaacgttaccaactctcagcgtatcgttggtgccctgcccaccatcaagtatgccatcgacaacggtgccaaggccgttgtgctcatgtctcacctcggccgccccaatggcaaggtcaaccccaagtacagcttgaagcccgttgttcccgtgcttgagaagcttctcggcaaggacgtcactttcgtcgacgactgcgttggtccccagactgaggagaccgtgaacaaggcttccggtggccaggtcattctgcttgagaacctccgtttccatgctgaggaggagggcagctctaaggacgccgagggcaataaggtcaaggccgacaaggccgatgttgatgcattccgcaagggcctcactgccctcggtgacgtttacgtcagtatgtaacaccacgactctattactatttcttgtcgttcatttatctctaacatcaatccagacgatgctttcggtaccgcacaccgcgctcacagctccatggtcggcgtggacctaccccagaaggctgccggcttcctcatgaagaaggagctggagtacttcgccaaggctcttgagaaccctgcgcgccccttcctcgccatcctcggtggtgccaaggtgtctgacaagatcctgctgattgacaacctcctgcctaaggttaacagcctcatcatcaccggtggcatggccttcaccttcaagaagactcttgagaacgtcaagatcggcaacagtctcttcgacgaggccggcagcaagttagtcggcgagattgtcgagaaggccaagaagtacaacgtcgagatcgtcctccccgttgactacgtcaccgccgataagttctctgccgacgccaccgttggtgcggctactgacgctaccggtatccccgacggcttcatgggtctggatgttggccccgagagtgtcaagctctaccagaagaccattgccgaggccaagaccatcctctggaacggcccccccggtgtcttcgagctcaagcccttcgccaagggtaccgaggctaccctcgatgccgctgtcaaggctgccgagtccggttccatcgtcatcatcggtggcggtgataccgctaccgtggccgccaagtacaaggtcgaggacaagatctctcacgtttcgaccggtggcggtgcctcgctcgagcttctcgaaggcaaggagctgcctggtgttactgctctgtctagtaagtaaatgatgaaaaataggtggtgaagggagagtctacatcggctctccttttgtcctgcatgtttatgaaactgtaatgtatacagccaatgaatttccttttaattacaaactcattttccaaaagaggtctggattgtggtcttagatcagataactaagtgttgtgcttaggtacgaaaccgaagctttagctacgacgtcaagagacctcccgtggtcaattctcatgtataaggatgagaggaaattcctacggtaaataaataggaccgcaacgccatagtgtcatgaatatggttgaaccatgccaatcccattcacaactccacctcgcaacgcaactccaactgatacttccgttcatcttcctacataatatcattttaggcttgcgcagaatcataagctttgatattagtggaacttcatgataatcccgaaaccaagatctgcgctgagtaatgaatcgtaaaaataagtcaaaaggaccgtgtctcatttcctccccgacaagctcccgaaaagttcctgacaaatgcatgtggcaataaagcttttgaatcctcccattggttccaaagacaggggggtataatgtgcgagatgaaatggccagccaactcgataatgaacccatcccgaaacccgacgccggggttatttctttttcgtgcgcttgtgcaggttcgtccagtttaagccgatgcttcgactttcttcaattcttccctggatgaggtgatggatgttagtgggtgcggtgaaagaggggaaggcgggagctttggcggggatgggggtgcgggcttcggtggtggttttggttcaaagatgaaagagactttgtggacaagaagcatagcataaagagtatacagagaatcgggaagtattgggaaaggcaaactcactggagctgctttgagaagtcctccgcggcatcatcgtcatcccagctctcttcccacaggtgctcgctaccgtcatttgctgtcgagccattggcctgctcggcttcttcttggggccagtctgtgtgtcgtagagttagcttcgttgctgcagggaagcgcttgagtgcttggtcgataccttcaacggggaaatcctcgaactcgtcgtcttcctccaagacttggggcttcgcttgtggtgcgggctgctctgtggcatcggccttctgggtagttgggtttgacattgtgggagatgtgatagacgggggagatcgaaaggtagataggtggagatgtggacgtggatgtggcagctttgaggtcggaggtcggaggtttgacttagtaagaccgcgataaggcgataacgatgatgtagctgggagagaacctcggaaaacagcacagcgttgttgatttaaatggaaaaaaagaaagaaatgaatgagtgactccgaagaagagaatagaagagaatattagaaatacaaaagagtattatgttatgaaatagagcaaaaaataaccgatcgatgtagaattcgccttctataagaaattgcccacacggagctaccggcgaaaagaatccatgggaagagcctcagcactggggacatgctatattacagcttccccctccccctcgaccttccttctccacctccccacctctttctgtgtcttttcccttttctctttgttattctcttgtatcagtgatgttctcgaccgttgagtttccgcacagttgacatattgacattcctcccgatccggcgctctctcttttcggcttgatcggattgtcctgactgagaccatcgtggattgtgtccccattgaaaatttcattcttcatactcactgccagcggttttcgtcatgttgcgtgtcgggtcctggttgtacggcaagaagccggcgcagtctgtggactcaaaggttgagttgaaagactgtgagtggcgatacactctaggaaagccatgatgattattatgttgcatactgaccgccctcttctgagctagtgcatgatgcgctgacaggtatgtcttatgggaaatgtgcgcccctttagataccgactaatgcgatgaaactagctgcaacgctgattctcaatgatgatgttgatggcgcagagagtggtctctccacgggaacttcatcctttcacaatgtgggtatcataaatacaagctatgacgtagcacataccttgaggaaaggcgctgactcctgatcgagtacatagctgggtaaaggcgtggtcgcgtttgtccgggcaacattagggttcgagcaggagattatgcgacaaggtccattgctctttctatcttctaaatccacattttctgacaatccgcagcatccgagcgcctctatgaagcagaaaccagcgcggccaacgatcaaacccggtcccagcaaaacgcccaagcacccaatgcttttcactccgatatctatgctgccggtaccgaatacgcgttgtgccaagcaatcgcccaattgatgagtgcagtggttggggtgctgaatgaaagcctgacagaaagtatcaaagcgttctaccgactgaggaaggcttatatcgcactcgatgcgatcatgaagatggaagagaagtttatggagcaaagggatatacgcaaagttttacggcccactgcgagtgatctctcaagctcgagcgctgcatgcccagacacgaagtcggagtcgtccagtcttctatcgaaaaagagcgcgaaaatggctaacatcgagaaatccgagcttaattcctcaatgaattcactggcgatctcatccagggcggtatctccagatgtttcaactccttccacacttgcgaagcatatccaccaagaccccgactcggatatcttcaagaatgaaatcgatgtttttgtgcactctggttccaatttctgctttggtattcttcttctactgatctctatggttccaccggcgttcagcaaacttctttccattattggcttccacggtgacaagcaacgagggctgagaatgctctggcaagccagcaagttccacaaccttatcggtgccatggctgctttggcactgctggggtattacaatggctttgtccgctactgcgatattatgcccgacccaactcctggtggatccgacgttgagggatacccgcaggagaggctggctgcgttgctggcggagatgcggttccggttccccaacagtcaactttggctgctcgaagaatcgcggatgttaggcgcgaacaaaaagctggacagtgctctggaagtgttgtccacggacaagaagagcccgctcaagcaggtagaggggttgtgcgtgtttgagaagagcttgaacgcattgtttctccacagatataatgtctgtgctgaagcattcattgaggtataaatcttatctggagatttttgaaacatcaagctaatcctttcagtgcgtggaactcaatacgtggtctcgttcattgtattactacattgccggatcgtgtcatgttgtcctgtaccggcaatcactcgacgacccaaagcttgcagcggaacatgctaaaaaagccaccatgtacatgcggaaggcacccgaattcgcggggaaaaagcgatttatggcccgacaactgccgtttgatatctttgtgactcggaaaattgccaaatgggaggcgcgcgccaaagaatggaacgtatctctggtggatgcgattggagtggacccggttgaagaaatgatctttttctggaacggacacagtcgcatgaccaacgagcaactgcaggagtctttgacccggctggaatggtgcgaaagcgaaaagaacaagatgtggtctcgtgagggaagcgaagaaaaggcgatcctggagcttctccgggctgctgtttttcgatccctgtacagacacgaagaggcgaaaaagatccttttgacctgcgtcttgaaccacgagaagtctgtattcaagggccacctgaaggatgactgggtccacccagtggcgcatttcgaaatggccgccaacctctggatgcagcgtcctacataccaggccctgcatgggattacttcccccgaggcgtcggaggaagcgtccgcggaatctagggagacgaacatagagatcgagaggaagcaggtatccgagtgcaagggatacctcgacttcgctgctcgctgggagagctatgagctcgacgctcgtattggactcaaggttactgcggcgatggaagcaattaacaagtggcagagcattcatgcggaagtctaatggttattgtgtttgttcaatccttgggcagcgcattgttcatagctgcccaggataccttgtgtagcatacacacatagagtacgagtagatgttaggattagatttaacgaagttcattttacgtctctttttccatccttttctcctctttcaacatcagcacaatggcaacctcaccgtttaattcccccgatcaccgatctatgcaacgtcaatgcttgaatgtcattggccacaaggagctccactatgcgatagcactcggcactatggccaccgacgccgagtctctcatttccccgtccgcaaatgataagtctcggtgcttagatggtgatgccgagatttcatgaaagccgttgaactctccccaaagaacttcccgttagaattggagattagcaacctgacatattccgaacgagttctcggataacacggcttttgccatcggaggtccgaccaaaagtccccagagtcttgaagaaaacgaataaaacgctctgagatgtccgatatttctcagccttaccgttgtcatttctccgcttgacaactccgttatatccacttattatctccgagaattatttccccccgacttttctacggacttttccgagtctacttcatatatcttgtttcgcacattctccctctcttagctctagcgctggtcctgcgacacttcggtcaatgatccgtaataatggtcgaacggacagaacatgactgtcgcactagcgaatctagcgacgatatcgaaccgcatcgcagcgacgaggcagatggaatcggagcattggagaagcaaagtactgcggcatcgggttattcagcctttgaacaacagcgcggacagtcaatagtctcgcgcattcggagtctcgaggccggtcagacggcgaaattcactcatccactcagccataccaagacaggtcctgatgtcatcgtggatttcgaaggaccggatgatccttacagaccattgaactgggatttcaggaagaaggctatcacgacggtgctgtatggattaactactatgggtatgtcggggaaatgatgaattgtggggaatgacgctaatcgccgttatcaatctaggtgcgacgtgggcgagttcaatgtatgtccattttcttttcgtcctcacagtttatacattattaaactaacagtattagctactcaaccggccaggcacagatcagcgaggaattcggcatctcaaatgaggtcgctacactcggcacctcattgcttttgttcggcctgggattgggcccgctgatctgggcacctctgtctgagctatatgggcgcaaaacggcagttttaccgccatactttctcgcggccatcttttccttcgcgacagccaccgccaaagatgtgcagactattatgatcactagatttttcacggggttcttcggctcggcccctgttaccaacaccggcggtgtcctgagtgatatctggagccccgagcagcgtggagctgccattgtcggctatgccatggccgtggtcggtgggcctgttattgggcctattgcgggtggtgccatcgtccagagcaatctgggatggcgctggactgaatatgtgtgtcttccacgcttcgttgaagttgaaaccatatgctaatatctactagatcactggtatcatgatgctattcttcctaaccatggaccttctcttcgtcgacgagagctatccaccagttctattagtctacaaggcacaacgactccgcttcgaaaccggcaactgggcccttcatgcacgccacgaagaatgggacgtgaccctcaaagaaatatgcaacaagtacctggtccggcccttccaactcctcgcaaccccaatctgctttctcgtcgccctctacgcatcattcgtctacggcatcctctatctcagtctcgcagccttcccaatcgtcttccaggaaatccgcggctggaaccaagtcgtcggcgcccttcccttcctcgcctacctagtcggcattatgatgggcgggtgcatcaacctcgccaaccagaaattttacatcaagcgcttcaaagcgaacaacaaccgccccgtcccggaagctcgtctcccgcccatgatgctcggctctgtgctcttcgccggcggtatgttcgtcttcggttggacaagcgcaaaacacttccactggatttgcccgaacatcggtgcggtcatgatgggcttcggctttttcaccatcttccaggctgctcttaactacctcattgatacattccagaaatactccgctagcgcgatcgctgcgaacactttcctgcgctctatgttcgcgggctgtttcccgctctttacgcgcgctatgttccataatcttggcgttccttgggctgctagcgtgctaggcttcatttccgttgctctcattcccattccgtatctattctacaggtacgggaagcggatccgagcgcgcgggatatggtcgcgagattcggtttaatttttttgcgaattcattgtacatgtcttcctattaaatgggttatgcgcacatttgatcgcagcctagttggatacacacgcgcatgccttgcatttgatatttgataccctccgagcgcctccgagtttcagccatctcagattgacccctacaagcctattataccaggatgtggtctaaaagtcctacttcactactttttctacaggcataattttcaatagacaattttccgcgtattagagtataacaaagaagcagcaagcacaaaaataacaggttgaacaggaagaaaaatgtaaagagagaatatagtgagtaaaggcgattgaatgccgtatgtacccaatccagaagacaaaaagccaaagccacaagaatatggcgaagacaaccagaatataaaacatgcaacataaacactgagagaaagaaatagcaaaggaaagggtttttggtgtatcctttttttttttttttgtgattaacacctgtttttgcttttttttgtttttctccgcggattccagctcgatcatctgatatcaagctcgagtactgactgtgtttcgtccggtcagcttccgcgctatggtcatcgccttcgaccatgtcttcttcttttcgatgcgagcgacaggatcaggcaatgcagcaccggtagcaagaagctctgctgggatatcatcctggtgcttggcgttgtgcaaagccagaacggccatttggcccaagaaagaggggtgctcaataaggtcctctagacggaccttgagaccatcttgctcaagaagccaggtaagctgagccaggttgaagacgtcaccgcccagatcaaagaatgacgaatccagctggaaggcggattgctgggttagcttgtcatcagcgtctgggtcggaagccacggtggtgcggctgggcaggacctgatgccacgagcgagacagaatgtccgaatgcacaagcagctctgcgatggagcgcgacttgaggtgtgcgctgaggaagtgctcgtctgaggctcgggacaggtcatcgattgtctgcggtggtagagagcgcagcatgctcgcggatggcagcgaggctgtcgggttggcgacgagggattgcgcaatctcacaggccatgtcgagaaccttggatgcgaatgatggcatcacaggtcccttttcggagtagcccagagtgacatccaagcctcgttcaccggaggggcgtgacaccatggtgagatcagctaggttgtcattgacgccgacaccacccatacggtacttgttgttgtcaagctccatggttccttcgtagtcgacgttctggtggaagactgaggtagtgaagtatgtccagtcaggccagtcggtacattgcttgatgatctcacggaagcccagagactcgaaaggcatgttggagacttgctggtcctgaaggtagcggaagatatcgacagcggtccatttctcgtcgagcttcacgcgcaccgggatgacattgacacaagggccaacagtgctctcaatgccgggcactgtagcgttgcgaccgctgatagtcagaccaaaaacaacatcggactgagcagtcagcttagcaagagttagggcccaggcagcttgcatgacggttgcgatggtgacatttccgagagcgatgggcgaaatctcaatctttctgtgaatctcggtgaatgccccaacgttctggaacatactggtgccctttctgcggacgacctgggtcatttgagagcctttgagaagatcggaccagtggcgataatggtctggggtgattgttcctggcaacagtcgcaagtaaccagcaaagggagtcaccggaggcagcggcgtgccttcatatccgtgcttaatggcagccatgatcttcggcaagcatactccatcgtattgagtgtgagagaggcggaccaagatacgatgttggtcgctgcccttcttcttgacaacgtagaactgcacgtactgctcgccttcgcgcggtccgtattcgcgatctctctgttggagggtcatggtgaattcatcaagagcgcggtcggtctcgtaaacaaagatgctgggacggatcttgcgcagcacgacctggaagaattggtcatggaagcacacgaagactgtgcgcaggatatcaaaggccgcgacaaccttcaagcaactctcgcggaggcgtctcaggtccaatggaccattgccttccaaatagaagtagttaagcatccatcgggacttgaagagagttgccgttagagacatcgcctggaagtcggtgacaggaagtacgtccgcgatgccacccttgaaaacaccaatcttgggacatatgccgctctgcacagcggcatcgtcgatgcaggacggcctgagaatctctaggctctcggtagaggggctgagccctagtgtcgttggcgtgatattgagtaaatcactatcagcctccctggggccgccagacttgagatcggcattcagcatttgctgagtaacattcgcagctcgcactgttgctagcatgtcctcgaagacaggattgttgaagacatctgcaacagtaagaaccaggccctcttcacgagcggcgctgaccatcttcatggcggtgatgctgtcaccccccaacttgaagaagctgtcctggtgtctcaccacgttgggcgagagaccaagagctgtgctccaaagactccacaatttactttccacctcggccaaaatcccatcctcactggaacgggaagccaccgaacaaatacccgaatcatctgctccttgtatacctaactggtacggcgagtcggctataggatcagggtgaccaccatagcttgacaactcttccgagtgaatgggaggcaccgtcagctttccttctctcaacatccgactaataatctcatgaacacgatcatcaataattttctgaatagcactgctgtcaatcgcatctccggtcgactttgccttgtcagccagagtggtttgggagtgatcccaatccagtgactcgggctcagcctcggaagcgaatgtggactgcgacagagtcgcagcgggagattcaatgaagctagtgaacaccttggcgacggtgtcagccagagcctgggcctcctcgtcagacacaatatcgttccagtatctcaaaagaatgccctcctggcctcgggcaatctcaacattcacggtgaccgcatactgtattcagttagtagttgaacaaagcattgatagggcttatacttacttcgctcggatcatgtgcatgctgaagatcgaaggtcaatcccttctccttaggacccgcaacggagtgattctggattgacaaggtagtattgaagagcgactgtccttgccaaccaagctcatgttggatgctggccagagagcagctttggtggggaatgcagcggatataatcatcctgaacattcttggatacatccataagagtttgttggtcggagaactgaactcgacagcagagcatattaataaagattccaaccatgtcctggatgccattgacaggggcatcccgaccggcagaaaggtatccgaaacacacgtcatctgagccggtgaactgtcgcaggacgagcgcccaggcggacagagtcaagttggcaagtgtgacagagctgcgctcgcagaacttgagcagctcagggaatcgctcgaagttcatcatgacacccttgagttctctcttggcttcgaacacagccgacggcgcgaggtggcatgggtgaactccaccaaggtattgtttccagtgactaagtgcatcactctggctctgggttctgatgaacttgatgtagtcgctgaagcgaggtcctgaaccctcagcaatctttcgctcgtaggcaagagtcatgtcacggaggagtacatccaccgatccaccatcgataatggcatggttgatctccagcttgaggatcacacgtccggtgtttgttttgcaaacagtcatttggtgagaaagcttcgattggcgcattgcgtttctggcatgaagagagatagcagccaacttctcctctacctgcgagtcatgacattccacgcggaggatattatcggaaaggttcttgagcaccagttgatcgaaagatccaccagtgtagttgctgtcaacgaaaattgttcgcagcacaggatgacggtcgacgagggtttgccaggcgcgggcgactccttcggcatcaaccttgctagatttggcgtctttgatctcaaacacagtatggaacatgtaggcgttgggatcgcggagctgactgagcaagaggccctcctgcatgggagagcagggatatatgtcctcgacctcatccttgttccgaatgccggccttgcggaaggtgctggctgtgagcagctggaggccgtgatagttgatggggaggagggggtagtcgctgagagtaggctcgggggtagccgttttcagtgtgaggatatccttctcgagggtttgcttgcactggacaatccagcggcggattgagccctcatgctgcattttatggttgtaggtgaaagcaacattgaggcggtctttgatcacaatagcagatacttcgaagagtgcaaaccgagcagtctcagggcccatatcacctgcgatagcaaagtctgagctgtcgaagacagtaccgtggtgatggaacaaggaatcggctcgctcaagttgctgcattttacccaggtaattgaaaaggatttccaatgggacagggaaatcagtaccctggccctgtagaagacttttcgcgaagtaaggacggccgttgtctgcgatcttacgcctggtgtctttgacacgcttgataatgtcgttgagggcaccttctagtgtcagctttttgtcggtaagatcaggtatggcaaacttacgagcttctgaatgcacttgcaaaggcgccatcgtggtaaaccagccaactgttcgcgaaagatcaatgtcggcttcccagggttctcttccatgtccttcattgtagatagtcggcaccttgcgatcggtgaaagtgcgaccgaaggaatgaatgatggcagacagcaagatgtcaacagtgtctgtgcggaagacactgtggcagccgtcaaggataaattgggtggtatcctcactcaacgtgaaggattccatcttgatatctccataaacattgggtaagtcttgcatgccccagtaaagcaagtccggcttctccggggtgaaaggcagagcaatcgacgcatcgtgcgtcttggctctctccgtctgcatggcacaccagctttggaaagacaatgccttctcgagtgaaagagatccagagacaacgagctcttcgagatcctggaggacgatgcgccatgagaccatatcaatgcagagatggtgagcgacgaggaataacacctggccaccagcgcgaaggttaaagaggtcggctgccaggataggcccattgagaggatccagacaattttgactgtcagcaatcttcggaaccatcgctcgggtatcgcccacagagtgaacgcggaatcggaaagattcatcgacctcctgtgaggttgagttagaacatgttgaatgatgattttgtattgagcttaccgctgcagttttctgttgccaggtgccgtcgctagatgtgctgaagcgtgcgcggaacatggcatgctggccgataacagccttaatagcgcgcttgagcacctcgccctcacaacggcgagtgatgcgaacagtgatgctctggttgaaacgagcggctcccttgaaagagtctgagcactggaagtagagtctctggacgggcgaaagcgcaaatccttcaccagacttctcttcacgccgagagacaggtgccttagaactggcggtttgagcaagttccttcacagatctgctctgcaagatgtcgtggagtgtgagaacaagtccctgcttgcgggcgcgggaaatgacagccattccagtaatgctgtcaccgcctgtgaggaccggttagtatgttgactgtttcgagaggatgggatacttgcccaagctgacgaaagagcgatcgacattgaccttctgtgtggagatattcagaacctgagcgaatatttcgcggacgatgttgagagattcattcttctcttccttttcttgcggcttctcttcggtcttgccacgcttgatacgatcgtaatcggccataatacgctcgtaggaggcatcatcaatgtcctcaatccaagcggtgatcttcttccggtcgagctttccagaaactagcatgggaagcttcttgacgagagcccacgtctggggaaccatgtaaatggggagctggttctcaagattcttctgcacttcgaccagctcgttgtaggcatgacgctcaagctcatcctcatcaacaagctcgcaaggcttgtcggagattagcgaagtatcggctgcgacactgttcaacgacatgacagtaaccaggcgctgcttgagagggccattcttggcgagaacgacgacagcatgccgagtaagagcatcctcagaaaggcgatgttcaatctcacccagctccatccgttggccgtgcaacttgacctggtgatccttccggctgatgtactgaatggaaccatcagggttgtagtagcaaagatcgccagtcttgtagattcggcgaggacccgggactgtgggcgtgaagtccttggtccaggcagggtcagtggtgaatgcttctgcgtttttctcgggatttttgagatactccctagccaaaggagtgccttcgagtgcaagttcaccgactgcgcccaggggagtcagccgatcgtggttgtcgggatcaacaatccaggtaagagtgctgggaataccgtaaccgatacgcccgggatcacgattggtggccacggcattatcgaccacagcaaagacacacgtctcggtcggtccgtacccgttcatgaggtgaacagagttggcccacttggtgatgacttcattggacatcttctcaccaccacaaacgaggtgcttaagggaaggcactgaggatggctcgattatactggcaattgagggggtgaggaaagtccaagtgacattgagtcgacggattgcgccggcaacatcgttgagacggtcgtcctcgctgggcacacagatggtacctccgagcataagtattgcaagagtctccatgacagcagcatcgaaagtgagagaggcgaattggaatactctggaggtctcatccatgcgaacccacggcgcgaatgccatgatactgctgactacgttgcggtgctcgacaattattcccttggcgcgaccggtgctgccagaggtaaatagagcgtaagccatattggagggtttgacttcagcgcggcgacgggcagaagacttgagggcaccgtaggccttgatggtctccttgctgatggggataacagtcttcatcactcggctgtagcggtttgtatagttgggagtgcaaagtatcatgttggcaccaacgtctgcgaggatttcctcatgtcgcgaggtaggatgggacggatccaaaggcacgtacccaccaccagcaatgagaatactgatgagcgtgaccattgcccaagccgacttgtccaggcagactggaacaaatacctctgggccaactccgcgagagaccagatagttggcaaagccagatgcgagatcccagaattctctgtaggtgaggtcgccatcccaggcacacacagcctgggcgtttggggtctcgtcggccttctcacgaatgaaatcttggacggtccgttccacagtgagcgggacacgttggttccacgtaccgatttcaaccttgtcttcagggctaatgacctccaagtcgccgagcttgctcgtgctgttcttgggcaaggcaatcaattgctggagaacatgggcaaattgttcagtgatacgcttagtctgccatccattgatcacaagctcatcatgatgaacagtgaacgaaatatttgtcttggtaataccacattccacgacaagagggtgtgtgaagaaatcttcgcttgtttcacgtttctcgtcgatccacattttattatcaagctcaccgtcacctggttggattacaagcaggttcttgaaatcgcagcccgtggcagtgtctttgctgagctggcggacatgttgaagaccagagtgtaagtgtggaatcatctcggtagtagactggtggatcttctgcaagtattgcatagtcaacatggtattgtcaacctggacacgagtggggacggtggtcaggacaggaccagcaatttccgcaacaccgggaagatcgatatttctgcccgacaaagtctcgccgaagcagacatcaccagacgccgtgtgggtagcaacgacgattgcccatgcagcgcggaggagcacagggatcgtgaagtcaacgctattgcgagtgcgggaagccttgatgctgtggtgctgagtgttgccagcacgcattgcatcaggcactgcactcttgttatgagggaaaggactgctcgaaaggtcgctcaaataagacttccagaatttgtcagactcttccatatcctttttcaccaggtattcaatgaaaagactgtaaggagtgccagcgcgtttgttctgcgaggcaaagtagttctcctcaaccttgcggaataccaaaggaatactccagccgtcataaagggcatgatgaacagaccacacaaagtagctatcagaggagccacgagggtgcaccatggcgtaaccggtcagagatgctccattgtgctttggtagatgaaggatgtcgttggggaggtcgtcgaacgactctgcttcgacccaggagatagggccgtccttaaggacaacttgagcgaagttcatggcttcggtatggacaatgcgagtgcgaaggatatccaagtctgccacggtttgttgccaggcttgtttgaatttagcaacatcaatgccagcagcaagacggaacgagggctgagcaacataagcaccgtgttgcttgatagatagcgtcaaaaggccctcctgtacggcactgcatggataaatatcgctgatgaggtccttggacacttcgcagttatcagtcacttcatccatcaagttctcgaggtagactccagagggcagcaatgagaacgccttgacgttctctttcttaacctcagcggctccattagacacgacgcaggtcttggccatgtcgatcaagattggggagttgaagatgctcgagacggtaagtgcgataccgtctgcttgagcagcaccgaccaggttcatggcggacaaggaatcaccacccagaccgaaaaagctgtcatcggcggtgacagacccggcttcaagctcgaggatcttttccacaagtgccacaagcttgatctctaggccggtggccgaggaagcctcccttctgtcagaggtgttgaaggtaatgtaagacttcagagtatccttggacaacgtctgcaccatggcccgcagtcttcggcggtcaatcttcccggaggaggtgaagggcaagttgcggatggggaagaagagtcggggcatcatgctctgaggcagaagctcgggtagagagcccttcaacttctgaatggcatccatgttagacacagagataggcagtagcaggggatcggctccagaaaccgtggggacaaattgatcgctgctgccgccgttggagtccggatcatgcacggtgaagaacgcggcgagcccctttgcgatggtgcgttcctcgggaacaacaacatcaacagcgacctgagagtcctcgggtaggcagcgaagacattgctgttcgatctcctcgagttcgatgcgctggccattgaatttgatctgagtgtctttgcgggagatgaaggctagactgccatcgctgttgtagcgaacaagatcaccagtccggtacatacgatcatttcgcttgaacacaccctggaagccggcatgacggttccaaacaggattctcgaagaaagaggccttcgtcttctcctcgttcgcaaggtatccacgggcaatgttgcttccttcgaggatcaactcgccaacagcaccaacggggagaagtcggttggaattgttcggatccacgatccagactctgcagtttgaggcctttccaatagatgtgggatcatcattgacacgcttgccattccaatcaaccttgacaccagctgtggcaacgacagtggcttcggagggaccataggcattgatgacgcaccggtctccccagcggtcgatatggttagcgggcatcttctcaccacctgtgatgatgaccttcaacgtgggaacgttcttcggctctaaggtattgacaatggcgggaggtgccgtgatgaaggtggcttccatacgacggatggcaccacccaagttgttcatgcgttcctcctcactgggaatacagacacaaccaccagtcatgagaaccatcatgatctccagaacgctgacatcaaacgtgtagttagaaaattgcaaagcgcgtgttgtaggggtcatgtgcagcgtatcgatcatcgcgatcgcggtggtgctaagggcagtatgctcgacaacagtcgccttcggctttccagttgtaccagaggtaaagatagcatatgcagcactgttaggggtagggcgagcaccaggcaaagccaaaggcgagtcgggaagttgggagattgaagtctggcagacggcaaacgatttcgcgcagagcttcgaaactttggtgtggacagaagatgagcacaagacaagatgagtaccaatttcgtcaatgagcatcttcagtcgagaatcggggtgggatgggtcaatcgagacgaaagctccacccgccttgagaacagccatctgggcaactacagcccaagcggacttttcgaagcacaacaccacgaaggcttcgggcttaaccccaagactggagagatggcgagccaagcgactggaaacaatttcaagctgcccataagtgaaattcttgtcccaagagcaaatggcttccgcacgagggtgaagcagcgcctgttgctgaatgagctcgtcggcgcacttctccaccctaggaggggatgcggcattccaatcgcggatttggcgaactgagcgctcagtgaatacattgatatctccgattgtgcggtcacggaggttgtgagcgatcaaatcatccaagacttggtcaaacatgtccatgacatggttgacctggaaggaggaaagggtttctgaggagtaattgaagtggatctcggcgtacgaatgcgagacttcagcttcaaccagaattttgtaagcagtggatgtgcttggctcacgggtacttcctttgggaagattggaagctatgcgataggaaagggaggtattgaagagggttgtatcatcgagcccaagctggtgtttgacggcgtctaacacagcgacgtttaatgcactgttctcggagtctgtctttgctttttgaagagtctcttgcagcttttgctcattctgcacgaggaagcgacaggtggcaactccctcatccgccagtttcgtgtccaaagctgaggcagaatacccaaagcacacgtcgtctgagccggtgtaccaacggagcacaacggcccaggtaaactggaaaagagtttccacaggaatgccaaacaatctgctgaaggcatgaatgttggctgtctgtttgctgagcgtgcgggtggagcggccattgtcgcttgtcgcatgggaaaggggcgggaaaacgcagggctcaacatcggcgagatactccttccagaaagcgacgttggccccggaaagacttgcatgtcgtgaatcccgattaccagccttggatccgttccaacgcttgatgtcgaaagcctcgaaagcattgatcgaaagcgcctgggtttcgattctgagggcctggcggtttagctttccagaaacggtgaaggggagggaggatatagggatgtaaaaactcggaaccttactaccaggaagactagtgctcagattggcgtgcaggctatatacggcctctttcagctcaggtgtcgtggactggaggacgcgatccccaaaagtgcctgttgtggtatccgaagaaaccacaaaagcgacgagggcattggtcttcacgttgtcacgttgcagcggaacgctctccacaacgcacttcctcttgttgcctaggaaggaatcaatgcgcgcctgagtctgaattagctcgctagccaaggcggatccattcttatcgttctttcggccgaggaaaacaagggagccatcagacttgtaccgaacaagatctccggtcttgaataagcgatgttcatcgccttctagttgtccacaaagccaggaagcgtcgttgaaaaagtcacagctctctacagactggtcgtcaaggtatccccgagcaacaacaggtccctcgagtaccaattctccaacactgccgattggaacaaggcaattgtggttcgaggaatcaaccacccacgaaacacaagaggtgctctttccaatcaggccagcctcgttgtcgtcctgggaacagaacacgtggaaggaggcagccgagctctcgcatgttccatacaaaacctgcagttggagatcatcggtctgccagtggtccaggacactctgaggaacgacttcaccgcccagggcaatcgatcgcagtcccggaacatccttgggagagaaaaagcttgcggctgttggggtgatgctagcaacattaacatggagggcattgatagaggtggccaagttggcggggtcaatatcagccgggatgcaaaggcaaccaccccacatgaaagtgccaaatgcctcaacaataaatgcatcggatgtgtgaggtgcaaattgcagggtcctggagacatcggcaatcgccatggtggtagcgaatgcctcggctcgagtcatgacagttgaatggtcaaggacgacactcttggccgaaccagcggttccagcagtcatagcgacgtacacgatgtcggatgattgtgccacggggttgagaacctcgtcggcgaggtattcgaggagagactcgcttacagggatgacgtacggtacagcatcctcgagaacctgggccttctccggggaagccagagcgacttgcacagcgttgtcgacaatccaattctcaacaagagccaaactctggggtgtatcaactggaatacagccaccaccggctttcatgattgccagtgtggagactatgttccacacagacttctcgaagcagatagggatcagggtgccaggaccaacaccgaatgtgacaaggtaggttgccaaacgagaggagaattgatccaacttcgagtaagttaagttgccatcccaagcggtgacagccaacgcatcggggagcttcttcgccatctcttgcacaacctgatgagcgcacttctcaaaaggcttgggagtcttgctgttccacgccatgatctgggtgcggttgtcgtcgctcaagctgtctagctggcggatttcaccgtcaatgttcgacacgacgttctcaaggcaacggagataggtattggccacattggcagcctgtgaatcagacaggttcgtggtccagtagttgaggtcaattcgagcagtggtatccatggcctcaatgttgatgaaaaccgggaactcggcgggatcatggattgagccaacctcaacacactcaatgtcactgctgacagcatccttggaactaggaagccggcggtaggagacaccggaattgaacaaattcgtgtcagacagcttcaaagcatgttggatatcaatgagcgaagtgtgtcggtaaggaagactttccatgtagtcgttctgtatttgatgcagtacatcactgagcttcgcgttatcaggaaccttcatgcggcaaactagaaggttgataactggtccaatgacccactggacgccctcagcagagacatcacgcagagatgccatgtagctgaaggagacatcttcggatccacagaaggcgcggagagtgaggccccacgcggcattgaagacatttgcgagagtgattccgcgcgtctcacaaacagtttggagttcactgagcgcgccgaagttgactggaatggaccgaagtgcctttggcgattgttggccgtcagtgagggcagggaagtggcacggcttggcttggtccaagtacgagcgccagtaattgatgctagcttcctttggtgcatcctggaggtactgaatatagtccttgaacaaaggctgagggctttcctcgagtctgccagcgtatgcgagctgcaggtgacggaggatgattgagatagagttaccgtccatcgcagcatggctaatctcaaggcgagcaaacaaccttccagcgggtgtctggcaaatagtgaagcgatacgctggttctggctcgctgtaatccttgggatcctccttgtcaaaggtggcaatcacatcatcttccgatgaagactgcaaaaagataggagtaacatcatatctcttcagtacgacttggcagaaggggtcccgaggagtgaggttctcaacgaagatggtgcggaacatcgcatgatgagaaacgacctgctgccatgcattgatcaagcgatcaaggtttggctcgctagatccggtggcccgaatttcaaaggtgtcgtggacagcgtagtaggagctatctcgcttgcgaccaaggaggataccctgctgcatgcgagaacaagggtagatatcttcaacaagatcaggggactcgatacccagagcaggcaacttctcattgagcaatttgtccaaggtaggatagctcaacgacaacatggggaacgagctgagagtcaatcgtggctcgagggtgggaagctgctcggagagacttataagcagcttctgacattcggaaacccattggtgaatacggtcctggtgttgcataaacctgttgaaggagaagttgaatcgaactttgccggccacgaccatcgcagagatctcaaacagaccaaagcggggagtatcagcaccaaagtctgcggcaccgcctccttgaccagcctctccggccatttgatcaacaagctggaagagaccatctgtcctctgtagatctcggtgttgtccgacgtagttgaacgacatctcgaaggggtgggggtgctccgactctcgatttccctcggctggcagaacgcggctggcgaaatctgcgcgaccattatccgagacacgacggcggagatctttcacctgcatgagggtatcaacggggttgtcggaattgtaggcagagacgaagattgggtgcagaatggtgaaccatccgacagtatgcgagatatcaatggatggatcccagacttctcgtccgtgaccctcattgtagatagttggaagagaacgatcggggaaggctcggccaaatgagtgaagcatagctgccaggaagagatcaatcggctcggtgccgagagctttgttacattccagcagaattgcattggtgtgggcagggtcgatctcgaacgaggcacaatccacattaccatatgtagtttgagtgtccttcagtccccagtagccaaagtcggttggagcgagagtgtcggttgcaactttgtgctcatcccggaggatcttgcagtgctcagtctgcagacggcaccaggtttggaaaggcaaggagctatcgctggtttccgtcttctcgggatttaggatgatgtcttccaaatcttccagaataattctccacgagacaatgtcgacaaccaagtggtgagctgtcattgatagaacattaggctggtccttcaccaagaaataatcgaccgcaagcaacggtccagagaagcagttgattgaggattggctgtcagcgacatgagtcttgacctcgtccatgctgccaagattgtgcatccgccatctgtaagatcccttgatatcgcgagtgatgtgttgattcgatgccgttgcgaatcctgtgtcagtaaatcgcgcacgcagcatcgagtggcgagacaccagagtttcgatagcctttcggagggttgtttcatcgacgggcttgttcaaacgagtgaggattccttggttgaagtgcccttgaccctccttgcgtacaccaaagtgaaggatctggataggcgacaggctgaatggttcatcgacagcttcctcgtaagtcgtcaggtgatcgattgtcttcgcgcgagttgcgaggtcccggattgatttgctccgaagaagctcttgtacggagagagaaaatcctcgcttcttgcagagaccgatacatgtcatagctgcgatcgaatcaccgccgagggcgaggaaactctgattcaagtcaagctggttctggggaatgttgaggacacggctatatacagcagctaaagcatcctctatgtcgttggcgggctgtgaagcctctgtgccgacgattgcaacagaggtattgttctgaagatcggggtcattctccatacctgcgacccaagtggaaatgcccttgcggtcgagtttccctgatggcagaagtgggagagcttcaacacacaaccaaaccgcagggaccatataagtggggaggcgacccgataggcgctctcgaattcctgggacaagctcagcctttttcgaggcggagacaagttgtagaggctccaaatccgaatcagactgttccgcaagcaatccggtggaagagacaactgcggccaaccgtcccttggagaaaccagtcttggggaaaaagacagagcaatgagtgacgttcaaatctttgctgagctgattctcaatttcgccgagctcgatgcgttgtccgtgaaccttgacctgcgtatctttgcgaccgatgtaattcagggcaccagattcggagttgtacctgacaagatcgcctgtcttgtagaatctacggttagagccactttcagggtccaatgtagtccaagcagggtcgtagatgaacgattcgttcgtcttttgtggattattcacgtagcaccgggccaggggtgggccctccagaagtagttctccggggcagcccacgggaaccagttcatcgtggttatcagggttcacaagccaagtccgcacaccaattggcaggccgatatctttacaatcggtgtcaggtgtaacattggaattgagcacggatgccacactggcctcggtaggtccataaccattgaccagtttgattttggaccaagtagccagctgggactgcgacattgcctctccggccaggaccaaactctccagtcctggaacattctcgatttcaataaagccgatgaatgacggggtgaagcaagcttgggtgactcgcatctcgttgatggtagtcacaatatcgttgaggcgagcttcctcgctcggaatgcacacacatgcgccatgaatgagcggcgtcaacgcttcggccaaactggcatcgaatgtgtgagcggcgaattggaggcatcgcgactcgcgataaatgagcaaaccgggtccatgcaccattgcgccggacaaaaacgcgcggtgctccaacagggttccctgcgagacataagtcagctactcctgcaggcaactatatttaaatattcacaaagggctaaccttgggttctcctgttgatccagaggtaaacagaacataagccgcattttgacccgtgacaccggatgccagattgacattctcggcggggtcagacaggggatctagagtatcagcagaaaggggtattaaagtcttcgcaataggacgaagtttttcggcaagatgctgagagcacagcacaaccggcgcctgaaccgattggatgagagcttgtagtcgggaagttgggtgagtcgggtccaatggcacgaacgcgccgccggctttcatcacgccaagcattgccacgatgttccatttctgccatgtcccgtcagtatgcctgcaacgaaataaattctggaacattgatccatccatgaaacattccactcaccgatttatcgaaacacaaagccacgcggatttccggcccgactccctgcatgcgaagatggcatgcaagcttcgatgcttggtggtccaactcggcgaacgtcaaactgccatcccacgcacacacagcctcacgatcagggccgctcaacatttgatcgtggatagcctcatgaatgcagcgatcgtgaagctgcggcatggtggagttccaattgcgaatgcgttgccagtcgttttccgagaacaaattaagctggctaatagcggtgttctcggaggaaaggactttggcaagcaattgctcaaaaatgtttccaatactcttcatctgctccccggacatgtcacctttgtgccattcaaggaagatgctgatgtctccacgcagcaccttaacatgaagacggacttgacactgcgcattgttagagaattgcgtttctgtctgaacaaaatcaggttactggattaactaacctcgtccggaagagctgttgccaaaataggttttgaagaagaagcagtgtggtcatatgtgcgcagcatcaagatggtgttgaaagggagatatccctcggaagtgacgtccgagctgccatcgagctggcgattcgcactgtctgcgcgcaccttatctacaattgccgtaagagagtcgttgtcgttgatggatatgcgaattgtcgaaatattgacaccggtagaacgccgtacagatgatttgagagagcgcgagtcgccctcgagatgttggtaaccaaagcatatatcctcggaacggatatagtaatgcaacaagagagcccaggtggctcgtagcattgggtccagacggccttcgttcgatgcggttaataactgcgcatgctgagcagccgttggtctcgtcttcatcgagactgggcgtttaggcccgtcaatcgtcgacgcgaaccgcggaagataacacttggtggattgagccatgctgtctaatgactaggtattaccaggctgccttctatttcgttttgtgttttccggtcgataaagagagtgtgggcctaaggtacgaagaacgaatgacactattagttcgacagtggttaaagagcgccgcgaattcggacggtctcgccttattttaaagaaccaacaagttttttttttttctaaaaaaaagtattattttcctaccccatcgaaaatagctacgttcaccggccggagactgcatgggccacactctcaagaatccagtaataggcgctatattccttgcatggggtcgagatgaaagggagaaggatggagagagacaatacgtggagcaggcgtactttggcccccctgtggaaccgattcagactcttttctgctatgtattcttttttcttgttttcttttatttccaagcgaattgccatgtcgaatttcttatcttattttctattttgaactgccaatgtaacccttagaaaaggactagctcactcgacctaacaccaaaaggtcatcatgcaggggaaaggtccctacactatctgtctgtgtactctgtactccacagcaactgctctttcagagcccgcagtttccccgatctagagcccttgcggtctggaacgtgggaatatcgattcagagcaagccgtcaggggcgtaaggcttttcaactccgaatcatgctgaaattggatggcgttatcgtccacggggtgctctttattttttgcccttatccttacaaggttgcaatgctgacgttgctggcgttactggctacctgggcatatcaaaccgcttatagtaagctggtggtcatatacatgtgcccagctaggatgtagccgttaccttcacttcacaccgcggatgaaggctcttgcttctctgctgcattggcatcgccacagttacacgggcctcgtgaggcgtttataggtcacgatgtacaccgactggtgtgcacatggcactgaccccggactacttacttcaatctcacctctactttgtactttagaagctctggtgatgggtgcatggcatggaagtccgaaaactggggactgtatgtatcagcaaggtgtggcgagctaggacgggtcgaactagggatcaccgcgcagttcaggcacgaccgcatcgagtagcggaggtggcgactgggtccggtgatcgggcaaagttaatttcccggcacctgacatgatgtcttgatcttggaagccttggagaagctcaggggatgttcaggagtcaagaaaaacccaaggaaaagccggctgtgggtcgcgggtccgatacccgatctgaggtcatcaccctcttcgttgacgggtatccaactctctcagtctataaatcagaatatacgggggtagctatgacttgcatcggagggataccgttgggaacgacacactctaagaccttcttcggcatagccggcgattggatctcagaatgaaactttcaagagttacaatttacggaggaaatccatataactaatctaatgggtatatgggtacatgatgtgtaagacacaacagaccacgaatggtcgttcctgcaagggcctccaagggatacgggcgtatccgaacccggagactcgtcgacttggctgtatttttataacagttacatccacaatacattcaatagctcaatgctagacgagaatatgcgcataaactgaaagtgggacacaatatctcactcggtagctactccgtacggttcctccgatcatacccagttgcgtcaaaaacatgtcctcatggggtgcagtatgtagattgcttttttccttcctcgccttctcttctcttttcttgttgaaaactcttctcggatctgtcgctctcgtatgagcaggatctggaccgtacctttgtatgcccactattctcactagtcaagatatcagtcaagatttgaagaagctaagtggatatgagtggatgtacatcccacctatagggatatggcatttttccctcggagatccgcacgggaaagggccgatattggcaatacacaaatctgcactagttgacacttatgacaggctagcctagcgcccgcagttcggcgtcgattgtggactaagaacaatggaaccacctaacaggttgatctcattgttgatctttattgatcgtcagatagatcactttatcgggttctgcacgctttgagccccaacgtaagagggaaaaataaacgaaaattttccaagtgtccatggacatatgggagtacgaaatataccaaatgcattacagaaatgtctctccgtcagacagtctggaatcaactgcagacgtgagcacaattggcacaggtgtactccgtaaatcagtggggtccattatgcagagtatttgccacgcatcaaccacgcctcgaggacaagggggaaatgaaaatgaaaaccggcttaccctggtcaatcggctccatcggggacgattgttcgtcaggcactacagctgtaggtacatatcccgacttatgcacattggctcagtgagcgccacgcgaaccacatcacgtcttggaatatgcagcattcaggttgggcggtcgcaattgaaatccgtaatgccgatgacagcagaaaactccgaaggattcaatgtgggccacgccaaatggttgagtgaaaaggaacgattggcccggatgaaatgaatatgcgaatcctacggccactacggaggcactaggagcaaaatgtgacgccatggcggttggagttggagattggagattcaattttggagaattatgattgtgacggaacttgcagaaaccaattgtattatgcatcttatttcctatgtttttctccagatgtggaagattcaggcgatttacttcattcgccgtgtctaacttcaacttctgcggtgaagcagagttcgagaaatatatatctacgcactgagactgtaagcttggagagtgagaataagaataagaatagaaatagattacattaactagttatattaaattcaattaataataaacactgtttcaagccagatccggcagatctcccatcctacagatcttttttcgccctcacatgagcgggaagtgattccattgccctaactcgacacgcgcccagatgcccagacattcgccattgcaactcattggaggtcattgaggtcattggactcattggagtctaattattttctttctgcaaggtagcacgactccctcgtgtcgctcgggatttactcgaggtttccttgactccagggacggaaggatagcgatgccgtggatatcccccacatcctcaaggggggcgaacgagcctatccgcaatttgtcttgggaatcaggaccactattgatgacggaggtggggtcatgaaatcacagtccaatctcccaaggtcttatagtaaaacaaaaacaaaaaacaaagaaaaacaaaccaaaccaaaccaaaacagatgcagcaggatggatccatacacaccgaaccgagtctagatgagctcacaagtcattcagtaaaagtattgttgtaagatggttgcatcaagagctgtattcattcccgctttgatgcagccaaccagtagtagggtcaaaagggtagtctcggtgttttagttctcctagatgcaatgagctcctgcccatagggatgcggacctcgtctagccctaggtacctttattatgcagatctagtagtaaagctgactgttcttatgtcactttttgatccatccgatctagcccaaaaagccgcaagttccccgagctcatgcatgttcttttaaccatacactcttttgacttctgattccccgtgtcgctcgttactacgtctttcttttctttaaccatccttccgtcgctaggtggttcaggaacagtcatgacatcttccggcttttcagggccttcgtgccgcgatctagataatactttccgtattgatgctgggtcctgtcgcggaggattcgatttctctcttttatttgaggagactatcctcgagatattacctattctattaatgctaattattattcctggccgtctgtggattctcttgcaaaaacgaaacaaggttgtgggatcatggttggtgttcgtcaagcttgtaagttgactgtgttgatatactctgctttctgcagttcggatgcatcccccccccccggtctttgcaattgacaaactattggattcaggatactcttaactaataaacatatctaaacaggcggcttggttggcactgctgggtcttcaaattgcacaaacagccctatgggcccttccagcagccgacattaccaaagcatcggttgcagccaatgtgctcctcacagtcggcatattcgcgctcgtcctgctttcttatgcagagcacacgcgttctgtgcgaccctccttcattttgaatacctacctgttctgcagtttgcttttcgatatcgctcgttctagaactctgtggcttcgcagtgtggacagcttcaatgacatccttgccattctcgctacagtagcggtcagtgtcaaagcggttctgttcgtgctggaggctgtggagaagaagcacattctcaaatcggaatacgccaattatcctccagaagcgactgcaagtttctataaccgtgctgtgttctggtggctgaacccactgttcaagctcggctacaccggtgtcctgcgtgtggaagatctcttttcattggataaagaactgagctctgagcgcctactgactcgatttgatgagaaatggagcaaaggtaaatagccatccacgccgatatgtgagtttctatgctaatatttctctagtgactactaagtcgccaaacactctccaatgggagtcattgaaggccgtcaaatggcccctgcttgcgggtatccctgccagagcttgcgtcgtcgctttcaacttctgtcagcctttgctcttggagagatcgatctctttcttcaattcacctgtcaaccagggtacccaaaacatcggatacggacttattggcgcctatatcatggtttatggtggactcgcaatttcaatgggccagtatcagcatctcacttatcgcggcattaccatggtccgtggtgttcttgtcacaatgctatacaagaaagccagctgcttgggccttggggagatcgaccccgccaactcgctcactttgatgagcgcagacgtcgagcgcatcacacagggatggcagaccatccacgagatctgggcgaactcggttgagatcgccttggctatctaccttctcaaagttcaacttggagtttcctgtgttgttcctgtttgcgtcgctgtgtttgctttgcttggatcgttggtcgggatgtccttcgtggttgcaggacaagctaagtggctggaagctattgagaagcgtattaatgctacttccgggatgcttggatcaatcaagggagtcaagatgcttggcttgcaagattccttcatgaagtttgttcatggtcttcgcatcagcgagttggatatctccaagaagttccgtacccttctggttataaacatgggttttgcctggttgacccggatttttgcccccgtcttcacctttggtgtttatgtcggtacctcaagccagcccttgagcgtctcccgagctttcacatctctgtctctgttctcgcttctggcagaccctctcttgaccttggtgatggcacttatgtctttcgccggtgccgttggctctttccagcgtattcaacagttcttggacaaagaggaccacgtcgatcgcaggaataactcgcagactttgttcctcgatgatctcactgaaaagcgtgtgctgtcgaaggctaaggaccttgaactttcttccatcaactctgactctctcgagtcgctcaagcgctccagtgccccgccttctggaaacgccgtcgttgtccagagtggaagctttggatgggaagcggataaggatccaattctcaaggacattaccataaccatccctcaagccagcttcacggttctcattggaccatcaggatgcggcaagtctactttgctcaaagctttcctcggagaaatcccctgttccgaagggaaggttgcactcgccttccccagcgttgcttactgtgatcaaacgccgtggcacatgaatggcaccatcaaagaaagcattgttgcgatgtccgactatgatcctcaatggtatgcgtccgtgattcgggcttgcgctctggaagaagacctctcacagttccctcgtggggactctgctgttatcggaagcaaaggtattgccctcagtggaggtcaaagccaacgtattgcacttgcacgagcagtctacgcccggagaaagattatgatcctcgacgatgccctcagtggtctggacgctaccacggaaaatcacatattccacaaccttttcgggtcgggaggacttctgaaagagattggaactacagttatcgttgcctcatcttccgtcaagcgccttccctacgccgatcacatcattgtcttggaggaaggtggtcgggtttctgaacagggaagcttcgctgctctgaacaagactggtggatatgtgtcaagcttcggactcgggctgcctgattgggagtacaaggctaagcgattttccgacactcccagttacgacagcatggacagtatccaaaaagaaaaggaggcattgatcgaagagcctgagcaccatgataggggtggcgatctcggaatctacacatactacatcgacgccatcggatggctccctgcgactgtcttcatggtcgcaatggccggttttgtgttctgcatttcattccctagcatctgggtaaaatggtgggctcagtccgacactgcacaccataagcaagagatcggccattacgtgggtatctatgtaatgcttggctgcatcgccatgatctcactactcgtcggctgctggcaaatgatcatcactatggtcccaaagtctggcgagagcttccaccgcaagctgctgaccactgtcctcgccgccccgatgttgttcttctcgagtaccgacagcgggtcaatccttaacaggttcagtcaagacttacaacttatcgatatggagcttcctgtcgctgcgatcaatactgttgctacgttcttcctttgcctggcacagatggctcttattggagtctcctccaaatacgcagccatctccttcccgatcgtgcttggtatcttgttcttcattcagaaggtgtacctgcgcacctcgcgccagcttcgttacttggatatcgaggccaaggctccgctgtactcgcacttcaccgactgtcttcaaggacttgtgactctacgtgccttcggatgggaacatgacatggagaagaagaatatcgctctcctggatcactcccaaaagcccttttacttcatgttcgctattcagcgctggctcactctgtcgctggacatggttgtggcgggaattgctgttcttctgatcgtgctggtcgtcgctctgcgtggatcaactcttagtgccggctacgttggtgtcgcgctgctgaacgttatccagttcagtcagagcatcaagcttctggttaccttctggaccaacttggagacgcatatcggttccatccagcgtatcaaagactttacgtcaaccgtcgagtcggaagacaggcctggtgaagaccaggatgtgccccctaactggccctcgaagggtgcagtcgccttccactctgtctctgcggcttacagaccctccgaaccagttctcaacgatgtttctcttactatccaggccggcgagaaagtcggcatttgcggacgcactggaaggtaagaaacaatctctaattcaatatcctaattcttgctaacaaaacaacagtggaaaaacctccatgatcatgagcatcttccgcatgatggaattaaccagcggcactatcaccatcgatggagttgacatcagtcgactcccccgacgagcgatccggtcactgatcaacggcgtctcacaagattcccttctcttccaaggcagcgtccgattgaacgccgatccgaccggcgaccacaccgaccgagagatcttggcagccctcaagagcgtccagctcctccctgcgatccaagaaaaggggactcttgacacagacattgacgagatccacctgtctcacggccaaaagcagctcttctgccttgcccgcgccctccttcgcccaggcaacatcctcattttggatgaagccactagcaagtaagtcactcccctcacttcaagccacgtctccacttgacaaatatcgtttcaaatcccctgcatgagattccatccgggcgcgattaatttccttcgcgttttgtgatccgtgcgattcagccacacaccgatagaaccaccccttgctgcaagaaccaagactaacccactttctgcaacagcatcgacaccaaaacagatgaaattatgcagcgtgttattagagagaaattctgcaaccacaccatcatcgcggtcgcccacaagcttgacacaatcctcgacttcgatcgcatcgtcgtcttggaggctggtcgcatcattgagaacggggaaccgcatatgctgctggccgacgccaagtcgcacttcagcaacctctatatgagtgtcatggcgaccgaggaatcagattaattcctcttttggtttttggtttttgattttcggtttttaaaaattgggttaggttgtttgattgatttggcacctatacaggttgacgcgtcttctttcttctggcgtgacaatcttccacattccctttttcgaggtacatatcgacgacaacatattgatcttttggacattttcggagttatatattggttttcttgctggaccatgttcttgttacttttttgttctgctatgattattatttactctctttcattaccttataaccatggagtgatacttacacataactcccttattggacacttgattcttgatcttaataatctctaatattaattcaataccaattatggctttggctccttatcatatttcttatccagtaaatcaaaagcattattgcattagttttcttcatctgtgatattctatgtctatggtcgacgagcgggactttacagctcgacatacttcttcagtatgatccaagaagaatagacatacatatagtaaaactgggtatactgtcgtttatttcctttcccttcctatctgtagaaatattggacttgaccattttaaagttgcttgatatatatatcgcaggacttccatccatttccaaggggtacccaattgcgccaggaaacattgcactgaatcacatttgctaatgcagtcatgtatatctgcttttcaggttatgagcgcattgctcatttaactgtatttcatcaacgcctcgagtcctccactggatctccccggacttccattgctgtcacattcgcgccccaccaagatctaccaatcgcagagctttacctgccctctgcgaagtccaagtccatctacatccatactccgtactctcaccatccatcgctttatcaaatggagccccctataaatcttgaagaggtgcttgttgtgaccctccacacaccatttgggtgattcaccctgtttgcatcatcgaagcacattttcccgttaaatgaagctactatcagtatgtttgaaaacccaccaagtctactctttgcatataccgattaattcatgttagacaagagatttcaactcaaggcaccgcatgcccggagtcatcggagtcgctaataatccaaatgctaccctctaacctccgcccaactgtttttatatgttcgagaacgaggtcgaacgcccacaactggaggatttccgactcgccggatcacggaaccgactcccgacaccatcgataatagcaagtacgatcttttacgccccggagttatgtatgtcaagctctggaacacgttctaccaccgactatcaatatctcactactacacctctggagtacttgttggagactctaactccggcgagcgatatcgcgatcgtgagatcgcataacaatgtagccttggaaaaagatctaccttactccgtacaagatttcgtctccatcgataaacttacagattgccccttttccggctactgtggtacatatgtacatgtgggcctcgtggccggatgcgcgttcctagcgatgatcctggtcaccgtgaatgggtcaaaacttgctggtgctaaatgggtcagaggagatccactgataatccccgagatggtatttgcggatccgcgatctgcaatgaggatggaaatgtcttccgatatgcaccgacatcagatcaattcctaaattggcgtctcttcgctagacctgagtgtctcattgggcgcggttttaacgttgcagaatagtttaactttcgctttgctgtcatttggctaaatgcacttacctgcatatatgtactcgtagacctacggagtaattacattctatctatgaagagttgtataaatatgctcattatgtctcagtcagtatatccgtactccgtactccgtaccttggtcagattcggaatccacctgcccaagaaggcgatgattggcctatcctaattaggtatcctcatccctggtggatacaaggacaccccttctattgtcggtgcaccagccgtggctgttgatgggacctgttttcttcctgcccaggtgtgcgccttctccacctttcgttacccaagaatcctggaatattccattcatgggaactgtcgatcaccatttcttccctcgtgggacttctaatgcccatcaaaactactccgtacggaggaatataatacagtgacgcagcaaaagttttaagcacccattctactactacgtaccgccttcctaataaaacataccgccttctgaatttgtaataccgctcgttcccctcattatttgaccggcagaattgggtgctgagaattttgctttgacactgtacagagtagccttggtagccattatggtggagccaaacatgtcctcttatagtggtatttgaaagaaaagcaaatcctattttgcaccccatccgattatggactaccctaatagcaaagaaataaaaacacccatgtaccatacattgaaacaaaagaagaatcaaattcgacggccatggcaatccccaaggccaaaatgcaaagggtcatagataagtgccctgcgaaggtaccaattatagaaccatcgtttcatcattatccacatctttctcttcatcaagaccaaattcccagtctccacgctcaattcggctgacacggtcgagctcagactggaattcgcgacgcaggtgctcaagtgtcacgattatacgacgtttaagcaagtggttggttgcagggacttcgaaggacccaatgctgttacgccgttcgatggtggaagttttgctgcttcctgtgcggtggtcgggtgcaaaagcgacggctgtggatgttaggcgattgcgtccgagtggtgtaggggaggcggggtctacgtcctccatggagacgttcccttcttcatcgacttgtgttcctaagtgtctttcgtgaggaggaatcggggccgcgctgattggaggtccgttctcgacgaggatataagcttcgcttttgtcgacacaagcgaggaggttgattagagacaacagctcatggcggatttccttgctttcagcatcgtcttcctcaactggcgaccgggctgcatcctccgcttccctgcttttaagaatgagggctgatgacggagcatctcgtgctttgcggaggcgctggacgttgcggtaggcgatttcagcggctccgcggtagtcactgcgggcaatgcgataggcctggagaattcgggtgtagtcgggggtagctgggaaatttttgctgtccgcatccagccaggatacattggtggtttgtttgcgggtcaggtgaacgaggatctcgtcaatgaaagatgcgatgttgggcacgagcgaggtggggaaacggagaatctgcttaagaccagcagtgccaggtccagagactgccaggatggtggagatgagttcggtaagttcggttctttgtaatttgagatcctgcaacctagccagagcggaatatgcctggtcaaactggcaagtcttaagggctccagtaaacagacgagacagcagatcgtcgcgtacggtcgggtattcagagtcttgctcggcccagatttcagagtcgagggcctgcagcgccaggctggcaaagtccgcgacatgagagtaggagcgcactttttcataaatggagaggatgtgctggtaatatttcgcaagaccgttgtggaagcagtcaacatcgaggaggtctaaaagctctgctgacatgtcggaaagattgcccatcggcttgccgcaagctgcatttaggttagctgagttatatcaacatgagaaatcaccaggagatacgtacagagtagataggctgccttccggaaatatattgctgccgtatcgaattccgacatggccacatgcaatcgacccttgacatacgttgaccaggcagtacttccctggaaacgaaggaagtcccatgcaagatcgatgttgttcttggcgatcaggtcacactggatgtgagcgactgcgcttggatagttcacttcgccttcgcgggtaatccaggccacgacatctctgattcccaaagtcaatgtatagctttgtggagagtcaatcgcttgctggggcttgatatcggtaacaaacagatcctccaggatgctcgtagttcgttcactgttagtcttcgagctgtctttcagtgaaaatctctgtgttgaatcgacgtggggcttgcttgccctgtcgggacattggcggacattagagctgagccaggacatcatctcatattcacgtaggagatcaacaagcattgagaaaaggtcggacgcatcgaagttggacttgcttgtttgctcccattcgccatccacgaacgtgacgaggattagtagatcaaaaaagatttgacgagatatagagattgtctcctgcgcaccactgacgagaactcgagcgccaaaccatgttgaagagagttccgagtcttctccacagaagtgaagggaggcggtatggataatggcaaggaacgcctccatggacaagcaatcggtcctcatgtattcactaagggctgcatccagagtgtcaaaggctttgttggaaatttgattggcaaagtcacagcgctctcggaagttctccatgcggtccatgatcgacgaagaaggctcagaaaagatctcggcctggagagcggctcggcacgccccgtcaagctctggggagaatcttttgcggaaatcggatgccaccttcaacaatccagaggctgtttcgaaattcgggcccagctctctggaaacattgcgatgcctccagcgatctaccatcttcggcactccatcactgagctcggagctggaattgtgcaagaacaattcagtgatgctgcattcccgcactacagcgcaagagtctgacaggaggagccacggcatatcggtgtatgagtcgtacgcgagagaaattggttcgaaccgccgcttgttaaggtcttccgcaacttgccagaactgacgccactttgaatctgtatctgaaagataccgggggtagtccatctcatcgtccgcaaatttccgaagggagactgccgctgctattgtggagcagagtcgttcctctaaaggcagactctttttcagccctccagatgaagtcgacgagagtggcttgagagcctcctgataaacagccagagcggtctcaaggacttcaggcagatacctattcggttgcaggagatactgtagccacttctccgttggatccaccacatcatccacgaccagaggtggtggcaattcttgtcgatgggtttcgaatgttgtcgaaacccagttagaggcccagtccgcgactagggtttggaggttgaaatggagggtgtagagttggtaaagaccgtggtttctccagagcacccacagctccattcccttgccttcttcccgggatttgacctggaaatcagcgatgctccagaacatgttccctgtggcatccggatccacaggtcggaaaatatcgtctgcgaagagttcctcaatgatcagttcggatgtcagcccacccttgacagcccagaacttgaactttccgtcctcaaatggcgaatatgtgacgacatagaagcgatgtccaccatgcatagctcgctcggcgttgaagacgcgcatgaatgatgtctcggcggggttcagcgtgtacggtgcaagatctggatcatgaagcgagcgtcccaggagatcttttgtggccgccagcttgttcgttgctagattccaaatcttaagagtgtgattcagacagatcgcgaagacgtatgtctcgtcggaggtagtggcaatggcatttgcgacatgcaaatcgaggttgcgtccgtcgtgtttgatcgaggagggtgcattccatttgacgaggcctcgaatcgaagagccccatgttcgttcgtcgaaagtgagaggagaccaataggaacctagtttgagagacagtcaattaaacaggtgttgtaaaggtaacaagaacgagaagaaccactcaccatcgtcgccagctctccgggtcagccgtagaagcgcgccgttatcgagagagatgaacaactctaggggactgctcgcgtgtagtcggtggggattcgaaaaggccaacggagcggggaggaacgtcttgcaccaatccctcacattttcatcgattgaagaggtccgtcggaaaaattcagggcgtagagacagggtgtgaaggtgcttagaagcggtgatcacaaagacactgatgagttcgtgatcctcggagtcggacatttcaactccgaaggggagaatctcctcctggaaatccagtcgcagggtcacattgtattcgtaaacctccattccacctttagtcaggtccgcgcactgaatctccagcactttgttgtcgttgatgacccgccacaagaatgtcctcggatagaccctgcgcttccgaaagtagacctcaccctgtgtcgcgaggtgacgtctggcaaattcatcttcatctttggcgattgggagttcctggtcggtggatgagatcgaaaagcgtggacgacggatcgcgacctcttgagtcggaatctggatgttggcgaccgtggtcggcgagtagggccgaaggtcgacccttgagtctttgtaaattttcgccatgatcgaattgacgtgtgtcaacttagcactccatggccggggaagtaaaggttggaagatcgaagggcgggaagctggagctctcaaaaaacatgggaagtcttggcgcgataaaaggcctgagattgatggcttccgccctttgaggtttactcagaccacttacactctattttactctatgttatcttctaggtgaattgcctctcttcaaaagttaagaataaacagaaattgtgatttctaattgctatcaaaaaaaaagatcccccaacgctgagatgagatgccacgggtcgctctaaccacataaacagctattgaatataagctcatcaagtcaataatatcgtgtcgcagaacaagacaggcacaaccttgagaaatgtcgactcatttatcttccaagtccttctcactaggatcaccgataccattatcattgatagcgaaaaggcaatcactctctggaagacaaggactatcataaatcttgcaaattcgagtctcgccacggcccttcttcagactgagtcgagtggtactggcgtgggcgatgatattaccaccaataggtttcttgggatccgggttaaacatagcactggggccaccatcgacttgggcaacgacctggtttgtgatcacgactgcaatgccaaattcatctgcaaggcgttgcaaggtacgcatgaacttagccaaatgactctgccgtgaggcgagctcaccacgaccgttaaaatccgttcggtacagagatgtcgcggagtcaaccaccagaagagagaatcgcgtctcgcacatcatctgtgaggcctggttgagcaacgagagctggtggtctgagttgtatgctcgtgcatatgccacattatcaaggacctcgtcaccgacgagaccgtatcgctctgcaaccgcaaggcatcgcactggacggaaagtaccctctgtatcgatataaagacacttgccctcgccgccacccatatcaaatggaagttggcaggtcaccgcgagagtgtgacaaatctgactctttcccgttctgaactccccgaaaatctcagtgatcgaccccgtttcaaacccacctccgagcaatgtgtcgagtctcttggatcctgttgtgatagagatgagctcgctcctccgggcatgcatttcagttgccgtggtgaatcccatagggaccagtttcgaggctaatcagcgcgtttcaattagcgaacccatcttcaatgtagaacttatctgtcgcagaagaggggtttaccttctactaggatcttagtggccttttgttccgagatacccttaatctgttccaacaaccgtttgggcctaaaagtcacagtagtgttaaccaaattgagatgagcagggcaatcggtatagcagagctgccgccggggggaaaaagccgcaagaatgaagatcatggatactcacgtgtaggcgatggactcaacagtgttatatcctgcatccaggaacaacttaatatccctagcggtcaagcccgaaacaccctatcagaaccaatttaatttagtataaaggtccaacattcttcggcgaaagaatatcgccgtgggattcactcacgtcgagcgcggaaagcggagtgggggctccagggccaggaagtccactatcctcgagttgctcttctccctccatagtagcagtagtactcgtttctcggtgttatgaggatcttgatgccttttggcggggtcactcgattcgaaagcacaggtgatgacgcgtttggggtttgggtgagatgagtactcgctcttctcgattttgaatattaaacaaagccacgggttttaaatgatcaattagcaagcagaaaatctctgtaaagtctgaaaggtctaaagcgtctgtttgtggcaaaaaatctccggatgactctgagaaacaaatcggacgcgtcaaatggatcgcgagatcacgtgcagtgctgccttgagcctttccggtttggcataacgaactatatctcttccaatttatgaatacaacatatgtgtgaagcgcatgtattactttgtttctctagtactaccttacgattaaattaccagcaatggttttcattggggcggatcaattactgtattcccagtgggtcggatgctaatggttcaatattcaataacaaaaggtgtaagaatacaaatcctgcaatggcctgcatgctaagacgccgtctgtccattgaatgatattcactcaatgttctttgagtcatggaaacccaagtgctgaaaaactgcccatgaactgccgcaacgccatatcaaaatcaatgctaaatgtccgagcaaaagcaggtgttgaaggtcttcgaggtgtttgttgcattcgttttccttgcgagacaatgattttttcgtgtactgtatctccctactgttgattctcaggagaattgagccacggacggaaaggacgaagcaacgacttccggaaccgtctctgatactgacgcagagccggattaaactccagctgctcggctggcagtccgatttggatattttcgttgaagatctggcttatcctgcgtcggaactcttctgatgatcgccggcgaagacggtctatgaatgaggcgcattagtttctgtgttcaattcctaaatcgtggcaaattaaacttactcatggttcgtgagccccgcttgctctctggtgaaggaccagatggtgactcaccgatggctgggacatatttcatgccgtcatcaacgccgtccaatcctactcgataatccttcgtgtcgggattagaggttgtaccgaatattcgcgtgtgaaagctagcacgcttttccctaactgttgtgtccttcatgccgatcattgactcctctcgcgcaggtgacatgcgcatggaatctaggttgagcagactagatcggccataaagtgcgctgggtctttggttctcgtaggtgaagcctgcggaggctgggttgagctcgggaacgacttcacgtcgggcagccagtggcatgggctttgggttgatcaaggaactgtgagattccaccgaggagctgggggtgtcaatggttctatacagcgaccttggcactggactggccggtcgacttggaactggactttgcgtgggtgtgttgggatctgagacccagatcccttccactcctattcctctttccaaagctctggcaccgaaagggatgtcatccttgtgcagcattgggtacacctcagcttcctcctctcgttcttttgcctctgtcgcagtgtgtttgctcatcgtccagcgattccagccgaggacgcaaaaggcgtaaaggagcactaggatctgcgaagcttgtcagttggcgtctttgtggcattatcatggagtcacgtacgatcagcgtagctagtacctgtcaacgacaatggtcagcaggggacctccgtggtcatgagtgtatacttatacttaccacagtcagcttctcccatagctcccaatctacccagaacgtcatagtggccggttactttgaactgtattcgggctttaccgtgaagaacatccgagtaagaatgtgcagactttcttttggggcacagatgaaagagatttacggataaaaagatactggagagggattccgaggtcttaggttcgagcaaaggtgatctctttccgggaacagggaaagggcagtggtggcaggagcgcctgcttaaagcatgtccgtatagttctgggttttctttcctttttgttttttccttttcatattcatggtctctagtacgtaggccataagcatgcgggcatttatgatttacatacttcattgactgtggatacacagtgtccagttttgaattgcagctatgaacagctactgagacggccattcaagagagggacaaaaaaattagctcctaatgttgattgccatataaaaaaaagaaaatacagaaaaaaaaaaaagaaatctctccctcggggaatcgaaccccggtctcccgcgcttatcggttttaatgacaagcggaaatcatcaccactagaccaaggaagaatgcgatggccgagttactgctcggccacttggctggttgatagggaggttagccatctttgttattataagccagacttttaccgaacatcttcaatccacaacatatgcaaaaggtacacacgtacgacatcttggtcgctaaactctcaaattaactacaaaaaatattgaagagtctgccttcttgatcttataaatgagaaataacaaaaagtcttcattggtcatacgaggacattatgaaagctacttttcgcctttatttcctcattcttttcaaggtttcttggctcttctctacttctagttattataaccttgtgttggcactagatgtgtcaggaagagtgaaattaattgactcagacgcacttgattatatatctctctctcaaaactcagttaaccaccaaaacagaaaaagtcactaaatgctacctgatatgtactcgaaacacttcaacgagccccaggcttggcgtttcctgggagacaagtatccagtcttgtcatcctgacagcccttaaaagccgcataggtctctcctatccagtcctcatccacacatttcgaacccgaatacatataacacttgccacgtgtgagatacaatgacttaggctttgtcactttactggaagcacaggtgccccagttgagaccaccgttagtccaccatcgacaggacgtggttgtattcgatattgtggtgtcggtattgtcagcgagaatgatacaattctcagtatcttgagtttcgtgtccttgaagagagaagtaatcgcctgtacaaccagcaccttcgtatattgtcatttgccaagtcgcagacggagcgacactgctcgtggtttttgttaccacttctatgctagtcatggttaccatgttcaccttctcagtagtagtctttgaagtagtcgatttggaagtagtggtagatttggaagtagtggtagatttggaagtagtggtcgatttggaagtagtggtagatttagaagtagtgggcttggtagtggttttcgtagtagaagtctttaaagtagtcgccttcgaagtagcacttttggttgtgacttccttttgggtactcttcggtccacaattgaacaagcaaccgctgctagcatcgcaataatccgagctagtgccacactgaccaaacttagaacactggagatataattagtagagtcagcaagatgggcaattccgacaataaacccacacattgattcgaagagcactggtttagagaggcgagatcggcatagttggcagggcgtcttgtcccgggaacctgaggaccgcagacagcatgcgggagagcaaccggcataggaagggcaccggagctgagacaaacaaaactgccttgcttcacattgccacaacctgtccagtcccaggctccgacattccaagtttcgatattgctggtagtgagctggtagcgcttagcaagagctgcgcaggtatcaccctgctgaatggtataggtatagcagataccatcgctgccaggcgcaaatgaactgcgtttattgagtgaatggccatgagagtcgccagagccatgcccggattgggcagttgctatgtggacagacacaagagagaggaggatatgaatgaaatacatcactttgaagatacccttgaacgtatttctggaaggatcaatcagtcctttataaacagttgaatatgagaaaaataattcttcgagattagctagtctgatcaaggtgaccatcggatatcgaggtcagttcattgttcaactgcagaccccaggaaccatacaaggttctgcctatcgcatcgagtgatgggtgagtttaaacaattaattaacaaagaagttgccacaacccacgtattaacctcttcggcttaccctttctttccctacacacgatatccgagggctaggatcaatacatgatttccaagcaaacacaatacggggaagcttacacatacaaggccaaatgcatcagaatacaggcatagcaagagcggataacaggaaaaaaacaacgtaagacttggccaaaaaagaaaaaggaaattagaaaaccctagatcctggagagatctgaaagaaaaccgagaggaaacggagggaaagttggcaacaaagaggctatttagcaataaatagcattggtggtgcccatgtatctggcagactattgagacttcatcccaaaacagtgctcaatagtgctaatggagtcacatcctgacaccagaggcaaaaaacctctttcaagttccgagtcatgcgagagtccacggggagacttccttttgtgtcatatttatccaggtagagttgaataacagtttccttggaccgacaaccttctcaatagctacttcgcatgcttgatggttattggggtgagccaagagaagttgaaaggaaagcagccagagagagataaaagagaatactgatgacagttgccagtaggtaccggggacaagctggccataggacaaatgtgacatctatgctagcaagggtccaaagtggacgcatgaccttcattcggcaagtcgcggcaagtctatgcatttgataagacttaaaaatccaggctattaactcctcgggattggtgagaattatacttcaaagttcaagtactgtggcttgaagacccgggatttgagtcaattgtgccgcactcttctgatttattactaggaagaaggaattgcggcatcacggtccaatgacccgacgcttagatccggacattatcatcgaatgaggttagcgccgactagctcttctgcacgcagtccgaaatctgcacgcggggactccgatgcaggggtattgtctcttctcatccggcggggaattcactcggagaattatggctacgaggtcttctttctggtgtcttctttcaatatgccaccacacaaccaggcacacattatgactttacactgctagtatacataccatctaggtatggggatagtatccacattattcacaattcccgtttacccacccctcccgcatcctctcctgggcatcattgcttgttgaaagcttggcactcttatcactcacaggctaatggctagaaaacaagcctatatattagctttcaagccacagtcacattaagtggctgttacttactgacaattcctgccggtgcgctctgaagagagcgatcacttccatattagttcggctttctcattctacgatacttgttaatctttatcaacatctccagccgtcggacatccggagacccggagcgctggagattgtatccttttagcacactcgagaaatagacaatgccattggactcagaccctagtctttgctgagtatgtgtgtggatgcaatgcatgaaataggtccgagcaatcgaggcatctgggtacttgtgacccgagcttgcgagcagttgcgccgataaagtgatatcttcagaaaacggtccttcctgggtttatgcatcggtctccgacggcatcagaagagatgagggggtgttacattcagagagaagtgttcaatgtgcattagctcgagtacttcggcattattatcttctattcttccgtgaagctatctgtggacaactagccacgatggctatataaacgcgcatttcccatgggagttatctcgttattcacacagtcaagctacctccagttctttcaatcaaacagttcaatcatccaatctgcactatgaagttctcggctaccatcctcagcgcagcgttgctcacagcctcagctattgctgctcctctcaccgaacgccgcgcagctcgcaatgtcgccagagctgagggccgcgctaaccgaatcacccgtccgccttacaagcctgacaccagggagcttcttagtctgaacaagacaagccacgaggagtacagctccaactgggccggtgccgtgctcattggcaccggatatacctctgtcaccggacaattcaccgtccccacgcccaaactaccctcaggtgcttcctctaccacccagtactgtgcctctgcttgggtcggtattgacggtgatacttgcagcaccgccatcctccagaccggagttgatttctgcatccaaggaagcaaggttacctacgatgcctggtacgagtggtacccggattacgcctacgacttctccggcatcccgatctccgcgggagatgtgattaaggtcactgtgaccgctacctccaagacggccggttctgccgtgatcaacaacctgactactggcaaatctgttacccacactttcaccggtggtgttgatggaagcctgtgcgagtacaatgctgaatggatcgtcgaggactttgaaagcggcggctcgctggttcccttcagcaactttggaactgtgactttctcaaacgcccaggccaagtctggtagcacgactgtcggcccgtctggctctactctcattgatatcaagcaaagctcgcaagtcttgacctcctcttccgttactagcaacagtgttactgtgagctatgtttaaggtgaaggtcacgaatattggaaacgtaatagtgcactagtaggcgaaggagagtcgggaggttggggggccgcaaagaaaacagggtttggcaagcaatgggagatactgtgttatcatttgtggtaaatacattagaagccaatcgaaactcattttgccttgattgatacatagagtggggagttatttggcataatctagtggccattgtgtgcactcctcgaaaatcaatattgtagatacagtttagctataccgatgtcctccgaaatattataaaccaaatgaaggtggtgatcatctagatctcgtgtaaatatcgcaatcataccacgtctacatatttgacaatttcagcttaagcattcaggttgagcggcgagacacaagagaacgagttaagctgcgggagctggaaggcatcaaccattcctaggagagaaattagtatggagtaaataacaagaaagcataataactcaccaacaatagccgcccacatgcccagtccacacatcgagagtgatgctaagcagaacacaatatgccaaacgttggtggcgacttggaaggtgccgccagaaaagaaaccgcggacccatcttgccgttgttgattcggtccggatcacctctccggttgtcgggttgaatccttcaccaatctccggtcgaatagcattcttctggatgtcaaatgcaagggcaaacaagggaggtatggtaaatgtcaagttcaaaagcatggaagcggaaatgatgctgacgaagccaaagtaatctggaacggctgcggcaatgataaaggcgatcgtccaccaaattgggacgagagaagcatagacaattttgccaacccgggtattcagaggaggcataccgaaaatatccatcaagacgttattgtagacgatcttgactccaatatttccgtagaggcctgcgcagatcagagcagagagcaaagaaaccatgttgccgacggtttgccacgagtagacgctgataccctggtaactcggactgaagctgtactgtccttggagatgatagacgacgcatccgtgagtgagatagacgctgtagatgaaaaactgggctccccacatagctttgaggaagtctcgaggccgccgcatttcggccatgaattcgacaaacagctgtgcacctgcatatgccagcacaccggaaagcatgccattcaccgacccaatgagtccatccgtggggatattgttgtaatgcatgatcggcgggtagttaccctcactatccggtgtgatcgttgctctgtcaaccgcactgccagctgacccgagcgtggaaattttgtagttcggtggagacatcgacatcacacccatagtcatgaagatgacaaacaaattcatccacactgcgagatttgcaatccagccatacgctttgagagtcctgatctgagaaacaaagaagccgacacaagcaaagatgacgggacagacaacatagcagagtcggaactgtgatacttgagagatgttttcgccaaatccgatcgtgacttggcccacaagcaagagtagcgagatcgcctgagagacatttgtaagatggcgaccgtaccgaccaagcgtccggaatccgagatcaccatagttcttggccgggaactcgtagctgtccacgccgaggaagacacgccaaaggagatatccagagtatccggccatgaatccgaaaacggtgtagaaggcaatgcctatatcccaatcagtcaactcagtgttccagatgtgtacaggaataaatactaacctggtccccaacccaacgtgcccattgcaaagcccgcgccatacgggccgagaatatccgttgtgatcaaatagaaacctagcagtcttgtaagtatggagttcaaaagatacaattgccgacttacaggcaccccatgaggcagacctaagcgaacggcttgcatttgtccattcctcgtctgtgattgcaagtctccgctcgcgagttgaaaagtctttctctgtcagtgttgtaattggcccttcttcggtctttttgcctgagagaagctgtcggatattgagcaccggaggctccaaaagctcttcctcttctcttgtcttcttcgaatagtaatggtactcctcgaatgtgatatttggatcgtaagcgtcgcgagcctgtggtttgatgagggttgttgaagtcaactctccaggcgaagtcaactcccgaggcgattctggcatgaaaccgccctctttctcgtccaaagagagttccatattcatcgacagtgagtgtagaataggcttcaaatgagaatgtatagtgtgagacagatgcgaacattcattgtccaagtgggtaaagttgatcccttttaatgtcatataaaccaagcgcgggggataagcagataagcatctgtccaaagttaattaattaattccgaggtatacaagcattaattcggagtgttgtcggagagagagcccaagtctcctatcgcgggactgcgactaccagttggacgcattaatctaccgataaatccaaatgaatgcaacgataaaccagccattgataacggtctttgataatccttgcctgattgagggtcactctggagaaagggccattgagcgagagctaacggggaggaaagataagtttcgatggaacctcaggcccacaggtgagtgcttgattggtgtctggggtatccggagtgcagccctaattcctcagatctcatgatgggcactgctgtacggagtgcaggagggctagttacattcatagatgctaacctctccccttccccctcacattgagcgaatactcggttctccttgatagatgcttattgctggaatggtcaaacatgtaatgactaatacaaaatagtcacgggacagcgtagcacgggacgcacagtcacgtggatatcgggggaaaatacttccgtcccggtattaacaatgccaatcttatccaccaatacgcagtaaccggccagtatatttttacgggctatttttcacaccctatggtcgtatatatcagataatttgtgggatagaaacatctcgtagaaatacagattcaaatgatggcaagaagggtatgcgcaatgttataggcgacaaaatcaagatgtcctgatgcaatcagacacagaagagcccaaaaagaaaaaaagaaaaaaaaagcaagaaaaaaaatcaccagcatctggctaaagagactttccgtacttctcatacttctcatacaagtgcagtatcgctattctcctctgtatagaggcaatcggggaaattcgccctgtagcaattttagcgcgtgaatcactaattggtgaagtgttgacataccagaaatcaccatcgaatgcacaatagtcaggcaccatccagtcagcggtgggcatctcggcattgagctgtgtaggtgatgtttccattccaagtggatttaccggttgtaatagcatatccacaacagactggagagagcgcttggcctgggaaaacaatttgaaattaccgtcactggggctatgcaaaatatccatgtgtacaatcagaacagacagattctcgattacccgtcgtcgagacggcgggtctaattccttgaaccgacatcgagatgatggctgtagaagatatagtgcaagggccccggcggcagggagagcgcaggatgccacctatatataaagtcagcccaacataatttaacaagtttctcagggtacgtactctccaggctagagatataaagccaaggttcggtagctgttcccgtcggaccaaggcatcattaaccgaggaaattagttccattgcggagcgaaataaacttgagtgttcgagtccatgccgccatgctgcccattcgatcaaaaatgaagactgtagatataaaatccgagtcatatgtaagcactccatttccatgcgcggtctttggatatcccagagttcgtgagatggcaccctcagaaaggacggtaggttctcccatgccttgttgagttcatggtgcaagtcactgtgaacgatcagctaatgtgttgcacgaactgagacgagtcacgtacattattcgccgttgcatatcatatatattcctgcccagaagcaattccaacgtctcttctcgaatcattgctgtaatcgttgaccatcgcataacagcactcggtcggatgtgaccctgcgaattccagccggcgtgatcaatatcttccagctctctactgagagcagtctccgacagggaataacacttctcgtcaatatcaaggggcaagttgatacagcaaaatttcttgctcatgcgcggtggtcgcccgagaaatgttgctaggctgatatcgatactgtataagcgggaaaaaatacgttttcttagttcaaccagaaagaagggaacatcgcgcgcttcttggatgctctcgtggagtccagcggcaagtagagcacaggctgcgtcgttgagccggcgccacgttttaagacctgcccatctgtcactttgagtcacacgcgaaaggagattaagagtttgtagcgtactttgatcaccataaaaaacagactgcacctggaacgtctgatacagaaagagaatatgaacgtcattgagaacctccaatgcctcgcaaaagattgcgcatttatttccaaattgaatgaggttcattcttaaggtctgccgttctggttctgtccggtacagagcatatggtgcacgaaactcagttgcggcaatactatgtcccttgttagtccccttatctctagaacagtagtttccgggattttcccctacccaacaagtgtaaggattgctcccattgtctcccagcggagattcggacccgtatactggtcgatgaggccttgcagcgtcatcaaacgatgtatttccacagggcggctgctattttcaaacaaacgctgtgacaaagctaataaatcggatcggaaatttttagaatgctgtagggtgacaatttcctcaatgactgcatcggcgaatggctgaatgaggatcgcgccgacatgcgactcgagcccgttccccttccagtccgagaaaaagtgcataacggtgttatttatcttggagctggtcagtgtttctagcagctgtgcgccctcgacggtcgaagcgttgttcatgaaacgagtagagtaagctggcccctcatcatcccgcccgaccggaagcaaggtcgaggcagcttccagatccccaaacaacatggtttgctcgcgtacattgcctaacagtgagtctagagaagaagagccttgataccccgtattagggtgtgtatttggtggcagagttggctggatggcttctaggatggatgtagaattaaaagccagctgatgtctggaatgatcgtcaggacgcaatttataacatagaggccgattaaatgaatcacgcactgcattcccggagattggggtgtaaaggagggtcgactccgcttgaacgcattcttcctgtagacgcactcatgggggatatctcgcccgacacaccgagcgcaaggttggcgatgatcgcaggctagtttagagagtcgacagggttcacaggatgcgactctcggtggccgctgtgcccgcgtactctttgaacgaccagacatattcaccacacgcacacgtggaagactggaagatgggggcggcggacgagaagcgggggcgttccccttatcagctgagtcgatgtttttgttttctaagagtgaaaggagacaagatattcatttgttcaggattcgataatttcaagctatgatattttcttcaatgcaggcaatgggccatcccaagttggttgtgtcctcccctcccaataactctccaccggtcgtgagcctatctcactctgtatttgagccgacacaatctcattttgcccccaaacgcgcagaatatttaatcccactagttttcgcacctgctcgtcggttgcaccgcgtcgcatgacagcttcaatgagtctcgggtatgccgagacatcctcgatcccactggcaacagcaggtgtcccatcaaaatcgctgcctgggtcaatttagtatgtgttattccgacactcacagcgaaccactcaccaattccaacatggtcccagccggcgatggaggcagcatggaatatgtgatcgaccacgtcttccaaactggccttgtccgggttgtcaggtcgaatgaacttgttcgcaaaaaagatcatgattaggccaccattttggcggagcatccgaaggacgtcatcgggggtatttctcagacgctttgcgagcgcataacacgccgaatgggaaaatatcactggtgcccgagtcgcagctatagcatctcgcattgttcggtgagacgtgtgggagaggtctatcatcatccctaggcgattcatttcgcgtatcgcggcacgtccaaagtcactcagtccattatccttgcctgtttccgttactgtgctggccgcagtagcgaatgcattgtcacagttgtgggttagagtgatatagcgcaccccgagctcgtacatttgccggatcacggcaagggatgaaccgatctgatggagtccttcagcaccgagcatggaagatattctctttgatttgaaggcttgtcgagcacatgctgctgtgtcgcaatactgcagctcgctatattccgctatcaagcgctttgccacatcaatctgctcaagggtatcacgaacactatgctataaattggagttgtcaacatcgctcttgagcgggaaagggccagatttgcaattacatttggatcgtcaagatgaagtattcggggacactgggttcgatgtcagtcacatgtaatgctgcatgctcaatagtcagggacctcacctctacaaagaccgaccaaaactgcccacccactttgccctgcttcatccgcttaagatctgtatgagatgcaagtccttcatacagccaatattaattagtccttgatcaaacgattggcaaacgaatagaaactataccctgatcaaatggaaggttgtctccataaatctgattgttgagctgcagtcggacaaggaatggaagatcgttatgtccatctatgagaggtatttccgataataccctggtcgttcgagccgcaaagttcaatggatcgatatcttgaggctgcactaggtctcttgctcttatcgcaacccagagcgctatagagatggaaccaatcgcaacaagcttgagaggattccatgatttccctctttgtgcgttgaacacaattacccgactatgattctcattatcactcgtggtaccctcgcacaatgatgaccccgttggccattgtggctcaattgcatccaagcgattcatagaggcggaaaagggaaagagatggccgcgccaagggagattcaggtatcatccgtattgtttgataagagagaaagactaaatcattaatctgtcgaagcgatacatttgtcaaatgtccgagaggttccatgctgtcggacagagtcaggagcgttacaccggtgacacatatcttgctatcataaagattcgcacgattaccacgaggcaaatgcggatgcaacgcagacagataatccaatggacattctttgacttatttgaccaattggcttgctttctcgttattgctgagggaaatcccgcgtgaggggcattcggagagagcacggagagagcaacaacattctccgagcggggccgccagagacgtttggcgttgcgacgttcactatcaagcaaaccccatatttaccgattaaagttcagggccatgcataaaactgacgatgtagcgcgctcgagatcgaatcatgcacacggtcagacctcaaaaacatcatgatttcacttcttgcaaaacaagtcaccctggcactggtctggggtgctgccaacgcccttccaagctccaatgcaagccctattctcgacacccgctccgtgcagcctgcctacgtaagtgtggcagtgacaacattgtggaccgaccccagcaagccgcgcgcaatcgatgagccggcactgacaaacccggtgcaaatggacaaatggctttctatgaacgtgtccgactacagcgacctcaccactaatagccggactcagacgcaagcgctttttggtgcacgagtggacatcatcggccatgagaatggttggtacgaggtggccctccccggacaggcgaccccaaagaacgccctgggatatcccggctgggtccctgctgcgcaggtatcgtttgaccaggaatacggacgactgctctcagaaaagcccttcgcgaaagtcgaaaaggctgccacggttccgctctaccgcgatcatagcctgaagtcgaagctaatggaagtcacctacgacacaagactccccgtcctgcgggagacaaaatcagccattgaagtcgcaactcccggtggtggctcggcttacttgtccacccatgatgcttccgtctacaagtctgcctcggatattccttatccgacgagccttgacctgatcaacacagcgaaactgttccttggccttccttatctctggggcggtatgtcaggatacgccgtcgactgctcgggattcacgcacaccctctaccattcgcatggcattgatattgctcgtgacgctgacgctcaagccgacttcactggtcatggcacccctgtcgcgcaggcggatttgcaacccgcggatctcatgttctacgcgagcaacctcagtgatgcaagcacgatttatcacgttgcgatgtatatcggaaatggagaaatggtcgaggcatatgattctggcactccagtgagaatcacgcctgctcgcttcaccgacgagtactggggagcagagcggttcttgaagcaccgaaagatctgaaaagtttttacagattttgcaaatgcttgcagagtgtttattttatgcatcagatgtaattggttaccaagcattcattgttatagatatgttatgtactttttgatatcgagtgtttcaataagaattcgaatttgtatatattgaacttggatagttgcgagaaagtgtatgaatgtagccagccatgaaaaattcgagactaaagggatgtcagaaaagcttccttatatgaatattctaaagtagcgcaatccccggagccatcaacgggtgaaagatgagattatgtaattgagatgagtcacgccaaatatgatacaagaatggtgatacaagaatgtctaatgatgttcccccaagaaagaaaagatctatcgatggtgtacatatgcaaagtcgtgccgtaacctaagcgccagtgacccggagcacaaattcatatacgccaagcgtaatgatagctgagggtaaagaacggagcatgtgaggggccagacctccgtacaagcccgccataccttcttctttagcgatggtactgaagcattgtaccagccctgtgtatttggcctggccatgctccacaggtgcctggcgcaatcgtgttcggataacctaagaattgagttagtgtgaaactaggataattgccgcagaggggaatacgtacctcatgaggatatgtgatgagacctgccacgagcttagcggaagacgcggcaccactagtactaacccaatggaacacttcgttccagaagggagtccttggcccctcggtagcttctaatgaccgattgagcctagttttcaactgttcatagagcaccagatgtagagccgtttcaatcgagccgaggtagcttgcgctcaatcctctataaaagccacccagtccctcatttcgcatgacttgcctgatgcaatcaacgctattgcgatatcgacgagtcgaaggaccaccggtgtgtgtttgtgttttgtcaagttgtagccgtgttttgacaagccatattggattcgttgctgttgaggttgcgagtccggcgcagattgcagcttgggcatggacgatagcagagtcttccgtgtgtcccatgagttgagctccaacacgcttgcaattgccgtatacgtaaaatttgatggcggtcgccggtactacaccggccatgcttggcccgaggcctcgaaagaaggctcgccagccttcagcacgataaatggaattgataatccgtagcgttttatgacttgatcgttgtgaggtttgaggaagggaggcgtcggagcctttttgtggttgataaaagtcggactgaagacgagttcgtaagacatcaagaggcgaagtcactatcgcggtagccattccaccgctcctatgattatgttagaagaatcaacataataccagctggaaaatacatacgcgcccgcaagaaggtgcacccaagaactaacagccttcttggtcggcatctcaacagggataccctcttctcctccatctgaaggagcatactgagtttgagcatttccacccatatttgcgtcgtaccttgagaagagtgagatcgcgaagggcgagtcccgacactttttttcggcgatatgaatttccgtgatccacgtcgccagatcacgtgtatagtcatattatcacgtgcaccctctattactttaatccagtgcaatggaaatatctacatatgaggaaggctggaagacttaagtaattgaaacagccgattttcactgtagttatatatatatatgattggcacataaagtacggagtactctttgcacattatgattgttggccttggtgcctgaaccgccaggtcatctgaccgccctggcacggtatatatggcctacggtgcgttttctctctctgattcacaattctcatcgcactaaggccaatgtacataaaccagtgccaagatgattacctcatcagagcaaggtagacctcagaaaagaaggagaattgtcatttcctgtacagaatgtcatcggcgcaagcaaaaagtatggggcaacacgaaagcgcatgaacaaggaaaagaaagctactaaagattgaatagtgtgaccgccagtatccatgctgcaactgcagcaagcgaggaacgcaggtatttatatttataatagaggcaatactgcttttggtctgattggcgactgcaggatctttgccactatgacgctttaccaaagaactgccaacccacccagggcagttctggggtggatagccccttggaaatcactaccaacagcaaggccatgcatttttacccacctgctagaccgggctgcgagcgggctagcgagtctgaggacaagatcagaaattttggatattccagctacggcaatcacaactccatgagcttattacggaccgtagagctttatggaggccgggccaaaggcttactgagcccctttcctacaaaccagtcacctttatcaagcgaggcagatcgcaagtacagggaattagtccgtcagctgccctcgcagccctgcatcgagatcttggttcaaacgtttttctccgacatcaattggcagtatgacctactcgacgagaaatcctttagagaagacctagatgcgtggggaaagatctcatactctgaccttcaagcaggcttcgcaagattggcgctgggaaccattgtgtttccagcgttactatttcaagtcctcgcacaagcacttctttttcactcccctgatgatgacatgatcaattcgctcatcaccatggctgaaatgaccttccatgatcttggggccgaatatagtgatacgggtgttgagttactcgcggttctgggaaaagaggacatcacgatcgccacggtccaagcaggtatgctacgtgcctcgtttctgaaaagtagtggcaaagttgttgaatcctggcatgtacttgggacaacaatccgtgatgcacaggaaattggcctgcatactggacaaattatgtgtggacaatttccagttgggcccgggcgcgagagacaaaacatcagtctcgttggtcacagagtttgggtggtcttgcatatttgggacatccatatggctgttgttcttggtcgaccgattgctaccgatctacagatagatcgcttcgcttgcactatagaagaagacgaaacgcggcgagaactattctcgcattggcaaaccgagactaacccccctcgaccatttgacgtcatcctcgccggctttaatgtagcctatcgatatttcaaggacatccacaaattggaacatcacagtgctggcccgcaagattatcctacggtcgaacatattcacggtgcaatcaagagaaactcagaaatgttaccctcttggtgccgtcttgaacacccagatacaaagtttgatcggatacaagggtgtcaatggttacctcttgcccgggaaggactgtactcactcattcaccttgttcttctcgcacttcatcgaccatacatattctctgtggccaacagtcgcacggaagcgctcaaagctggagtatccattcttcgtgcacaggaacgactattccagcaatcccagccgcaccattgcaaggtgttcagtccggtctacgcttcttttgatgcaattgttctccttgcagcactctgtcttgtttttccgaacgagaatcaagaactacgagcagactgtatcgacgttgttgaaagagggatgcaaagactgggaatcattggtcaatttaattccatggcaaagtcagcacatggtgttgtctgcagcttgtaccgtcgcctaacgcatcggttaaacctccccggggacgttgagcgagctggagcattttccaacaacccagaatggatctctcccaacagcgatacatttatatataacgggacactgtcagaactctcttttgatgctgttttacctccgcgtccaacccatgacctgttcttcaaccatatttcaagtacacaaattcctgttatggcgacaccagaaagtttaccctttgacccgcttagtgtgagcattacagatagttggaattttgaaggcgtcttttcagatgccagcttttggagtcggatgaaccagcctaatcattgaaaatgtacctatcgccgattgcattctattcaactcccgcaaaccagaccgcattgtcccccacattgcgatcgacacaatccagctggccatagtactggaagtgggaacctcgttgtttcagatcaacttcttttgacttgtggggatggactcctacttgcgcttagcagcagccgcattcagacagttgtcaccgtggatgagcagcgccggcttgtccagcttcgccacgacaacaatgatggtctagctaaagggcttgctgagctttctcaggtcgcgcttgtgcagggcttctcactgttcgcgggtgggcattttcctctccgctatatcggtaccaggcgtccatgaaacacacccagcgcaaattatgtggatgtagatgtagatgtcggtttcatagtctcggtagtatccagagaccgaagccacgcccccggttatcgtaggatgccacatccatggactcggccatcttggcaaataccgactaggatgagccgggatgcaccaagatcgccgcgctccgatagatagtcaagtcctgcgaccatgtcctcgtcttttatgttgggattttcagtcgtcaagttcgatatctataaaccccctccaattgtttgcatggcaactatgacgcattagattaaatgaacattccaatcatatcaacgttgcgatctccattttagtactccttacattatcgccgataaaagcgggtcaggctggacccttaacgccgatgaaccaatcaaagaagaattgaactgtggggattatgcaacaatcgatctccgctggctaccggatttggcaatgtgcgatgtacatcatacagtgaagctgggcgcagatggaggggcaagacttatataaactcaaagctgtccgctcgctcacagaatttaatctcccactacctgacttccaatcaaacaagcaaaaatgacacccaaggtcctcgttgtcctcacctcctatggcaagttcgccgccacaggaggttcaaccggctggtttctggtatgcacctctgactgcggctgcaattgagaaacagccattccgttttagatgttcacaaatgctgacgatgttttccaaaggccgaattcgcccacccttatgaggtcctccgcaacaaggtctccgtaaccgtcgcttcgcctaagggtggagaagccccattggaccccgcctccgtgaagatggctgagtcggatgacgtgtcactggctttctttaaggaggagaaagccctgtggacgaacacgcataagttgtcggatatactcccgcgcgccagcgagttcgatgctatcttttatgttggtggtcatggacgtatgtttagctcctacatctaatcaaaatatatgttctaacaaaatgaaacagccatgttcgacctaaccgaagacccagactccttggccttaatccaaaccctcgcggccgccaacaagcccgttgcagcggtctgccacggaccctgcgtgctgctaaaagccaccgcgccatcaggcgtgcctctcctctctggcgtgacggtgaccggactcacgaatgcagaggaagacgccacaggcctgtcctcggttatgccgtttatgctggagacggagctgggccgtgtcaccggcggcaactatgtcaaggccgccgagatgtggggcgagagtgttgttacttctaaggccgctggaacagggtcgattattattactggacaaaaccctgcttcggcgccaggcgttgcgaaggagatattgaaggccttggggttgtaaaggaaatttattcaaatgtcggtgttaccggagaccccaacgaatatgcagaataggaataaccatctcacttgttctggatcatatgtattcaacacgtcatgcatgtctcatgatttaaattgggtttacagattccgtaggtagaacaaattaaatctgatttgacgtttgattcttttcatctttaaaccacacctggacactcgataacaggtgtgtataggagctcattcagtattcattccaatcttaatcattactcttgtaaccttgttcgacatgtcgatggtttccagggtcccttttcagctctcaggccggtatgccgagcgaaaccgatgggaagttctcaacggcccaggcgactcacgtgtaactggaattcaaatcatccaagatgaaggtctagttaacaaatggagtgacaaggttgttttggtcactggcgtttcatctggaattggtgttgaaactgtgcgcgtcttggcatctaccggggcgactatctttggcacagcccggaatcttgacaaggcgaaggaagccttgaatgatgtactcgatactgggcgtttgaagcttcttttcatggatcagacagacctttcgagtgttcgggcgtgtgctgcggagtttcgcaaagagagccccaagcttaatattcttatcaacaatgccggggtaagctagtcgaaacaaatttctcaaagatcgtccgcccactatttgatcgttataggtgatgaataccccagaaagtcgtactaaagatggcttcgaactgcaatttggaacaaatcacctatcacatttcctactcttctatctactgaaagatatcctactggaaacctcaacgcctacattccattctcgtgttattaatgtttcctcgtcgggccactgttatagccctatccatttggacaatgttaactttgaaggaaattataatggatggattgcttacggagcgagcaagacggctaatatatatatggctacccaaatcgagcgtttgtatgggacgcaaggtcttcatggctatagcttacatcctggggccttcgtgagccccaacctccagaaatactcacaggaagaaatgaaagcagcgatgcaggacaagcgcgccctcgcgtatttgactagtatcgagcagggctgcgcaacgactatttatggctctgtctcgagtgaactggaagggaaaggcggattgtacttggaaggagcatctattgcagttcatccggctccctcaggcgcggatggactagaatatggatacagcagttgggggtttgatgagtcaaaggaaagggagttgtggaagctcagcaaatcttgggtaggagtagagtaaatgttaaggattatcaacatcaccatatatataatcaagtggatgttttagttccagagctatttgcttattgctagtattcaattaattgacacgataaatcgatagaaaaaggcaagaaaacattgtataactcaacaagttaatgatcatacagtgaagaaaaagaagacattttgttacgagccaattcgattcagaagaaaagagtgcaattcaaaccaaattctaagtacaaagaagaaagaaaaaggagaaactatttgagtgcgcgttcttcccttctcatacccttgcgtttgttctcgcttaatctcgtttgtcaatttgggaaggtgtgagggcgaggtcgttcctgcctcgtctggcaagtacgatccaaagtacgatccttcccagattgtcacagatataatacattcgcgcacatggtacatcaaacgctgcctgaggaaatccgaggaagatcagagtttgctggagacaaggtagggaatgttcttggcctcgtatagatctttgtgctcagacttgatgatatccgcgccctagattatattacgcattagtcttaccctgggagctggcggatctgtgactaaccttctcgccaatcatgtagaccgagttttgaatacggcaatcagggatcacggggatgatagaagcatcggcaattctgaggtttcggactccgtggactcgcagtttggagtcgacaacaccctggtggatgctcttcgagagacgtgcggtaccgcatggatctgtaaagtaaatcattagacttgtttcgggacattggaaggggtgatctcacggaatcctgtctggctgcgatccagaacagcccggttcatatcatcatcggaatcaaggggcatcttccaggggtattctgaaataacaatgtccttgaatccagctcccgtggtcaaaagatcatatgtccagcgcacaccctcccgcatggccagaatgtctaagtcattgccgaagaagttgaggttgatattcggctgtacctgtgcgttcgagctgtttagggtgacttcaccttcagaaaggggccgcagcagatcaacaatgacagtcatgtgatttcccttgtcaggcatagggtaatgccactggaatgcgctgctgaacaagccgacgaagtccagctcgaagtgaggttgtcctgctggcccgaaaggatccaatcccccattggcagccttagcctcgagataggcagggtacttttccaggcgttcgtcaattcgggggaatccgacaagttccaggaatccggagcttgcaggaccagtcttgtccttctgataagtggacagcgccttgtcattgagaggaccaggcctgaggatatggttatctaagctgtatccatccttggtttcaagaacgaaaggtacgatgggatggtcaagaagatgctggccgacgtgaggggattccacaatgggggcgattccgtgttttgccagttccgctgctgggccgactccgctaagcatgagaagcttaggagtctcaaagacaccttgagagagaatgacttctcggcgggcgtagacgctgatctcgtgaccagaagcttcacttatcacagtgacaccggagcagatgcgtgtggcagggtcgatgagcagcttcttcgagttaacgccatagaggattgtcacgttaggcttattcttcagataaaggaagctaccctggcgttcaccctggtggatggtatcaacacaatgggttagacctttcatctcgccggagtagatatcctcgctcaggggctggcccttagaaacccaggcctcagtgagcgcatcacggaacggcttcatctccggcaccaagtcggcatgggagatttgcaaagggcctccggttccaatcttactcagttcggccggatacagcttctcgtcgtcatggtaggtggcacatttgcggaggtactccacacaggaatcccaattccagtcatggccaccgaaggcctcccagtcgtcaaaggtaggcttcgagcccggaatccaggtgaagtagttggcagttgaactaccaccaagagcctttccgcgagtgttgggtttttcaacacgctcataatcatcgcgcttgatcatagttgtcttgtacgcccagtcgtacttgcttccgcgaagggtgaaagctttcgaaggggtcgtgatttgctcgatctgatcagggttggggatgccggcttcaacgaccagaatgcggacgctggggttctcagcaaggcgaccagcaattgcattgccagcagtaccaccgccgacaacaatgaagtcgtactcagagccgttggaaacaaaagccatggtttgggatttaataagacttgtgtgtgtgcgtgtgtgtgcgtgtgtgttcatagcaaaaactaacgagacatcgcgtggatcttatattccactcttcgcatgtctccaaatagaccatcttgccgctcttgccggatagtaagagatgtgggaaatggagcaacatgttttaccactagggccaaagtcctgggtatccatttgggggatagaggggccatcttactgacaagagaggcccttgaaccttgacttggtagggctgacagaaagggtaaatttgagttggaggtgttctagaagggacttagctccgaaagtgacgttttcgacccctcatgaggggaaaaccccttctccgcacgagctttgtcagatttccagccaatcagagattcggcatatgtcgccaggaacggcaataactcggccgggtgtcggtaaaccgcctgttgcaaagcatctccactatattgtaagctttccaaacccacttgttcaaaatatttggttttgtctcaatcccctcacgttaatatggaatgatcaaatgatttggagtgtccctcatggggggtgctgtcaaggtcttgactcacgtttaagatccagcccaataaaagccaggccgtttcctagaatatagagtattcacaacttatcatatcaattgaatatcccttgtacaaccaatcccaatgccgaaccattttaccttggccgaaggtatagtaccaaatatctcaagtcaacgttcccatcctgacaccagacaggtcaaccggttgcggatccatccgtcagcactacgttgcctacctttgggggtggtggcctcacaacattgggtgacacgcttctcattgaaacactttcgcatttcaaccgcgaacgtatacccgaaaggtctgatatcattcaacataatgcttggaaggaaaagatatcctaactctataaacagagtcgtccatgctaaagctgcgggtgcatggggagagtttgaggtcacaaacaatatttcctccctcacgtcggccaagttcctcaatggtgttggaaagaaaacccctgttctattccgtctaagcaatactggcggtgacaggggcagtgcggacactgttcgcgatgtgcgaggctttgctgtcaaattcttcacggaggaaggtaatcatgatattgtagggaaccacattgtaagtgttcaccctaagttcttacttttcatgttctaatgtctccgaagccggtattctttgttcgcgatcctataagatttccttctctcaacaggagccataagagacatcctgccaccaataggccagattggcccatggtgagtgctaatcaaagttactgagttgcggatgaagctaatcttttagttctgggatttccactcaaaccaaccggaaagtgtccatgctctgatgcacctttttggcactcggggtattcctgattccatccgtcgagtgacaggtttcggtgtacataccttcaagatggtgtcagctgatggtggcttccgctactgcaagttccacttccgaccaactcagaatatcacacacttttctggccaggaagctactcgcatggctggtgcaaacgccgacttccacaatcaggatttgtgggatgctattgctcggggggacttaccggtctggaaactttacgtccaggtcatggagcccgagcaggctgaaacctacggccgtgctctgtttgatatcaccaaagtttggccccacaaggaattccccttgatcgaagttggtcaaatgactctcaacagaaatgtgggtaacccattaccttagacacgaagcaagtgctaacaagccccagcccgagaattattttgccgagatcgagcaagccgcattttcgccttctaacatggtgcctgggattgcaatgacacccgatcctagtaagttcacactgatgtggtcgccagagggggataaaccactaaccattcttatctataatagtgttgcaggcacgtatgttcgcttaccccgacgctcaacgataccgtctgggagtgaactacacacagcttcctccaaaccgtgcaatatgccctgtatatgcgccattcgagcgcgacggcacgggaactataacccggaactatggcggtgacccgaactatgtacggagctcactaggcgctggtattcctagccaggttgtttccaacgtacgacacactgagcgcatcgcgcataacgctgtcctcggccagaatgagattctagttgatgatgaggatttcattcagccccgagagctgtggaatagggtctttgatgagcccgagagaagggagtgggtgtcaaatgtgtctgagactttggaagaagtgcctgatgagcttaaggatgctgtcattgccatgttcagcaaggtggatcctcgtattggccaattgttaaacgataaggccaagaacagtgcgcgtctttagctctttggttacttttgacactagatgcaatgaaacacgttttctatactcatacgactctttcttactgtccattacacgcaggatcagtaataaacaactcattgatgtgcaagtggtatcacatggtgcttgccctaggtgcaataaggtgttagagaagagaacaccatggggtgactactagaagaagaaaagaacattgaaggtgcctgcgtgctatctctacctcaggagtggttttacggatggataaaatgtccgcttagtcatcctgcgctactgttcaccgattaccacgtgatcacgggtcctacctccacactgttgtgtccctccgaggtccattgtttgtggccacccgcacattataggcctttcatttttttgttcttggcacatctcgcatcccgtccctgaagaggctagacaccacttatttgaatcaggatgtcgaatactacatctccagcctccctaaatgctgcttcctagggtcatactgttgccgttagtctacttctaggggcgggagcacaaccagatttatgtcatcctagtggtgaaaggaaaggtagtccactgaattgcgctacccgaaacgctaccgatattttgcttcctaaatctctgctcgattttggcgcagatgtgaatgccagtggaaatgatggcaagaccggacttattcatgcggcaagaattgacaatgctggttttgctatgctattattggaatatggtgccaacatcaactcggtatcagccgacggatcaactcctttgaccaccgcaattatctacaacagtcataatgttctacgattgttccttgatcgatggcatgagtattcgatctgcccccgtatgaagggccccaaccttctccaggtcgcggcactatatgctgatcctgctacgctgccttgagcatagatgcggaatacgagaaagataaacaatgtgcctgtgagagcccatagtacaccctaatatcaagaggtcagttaggtatactaaagcaatattgccattccgttgaatacccactaaaaagactgcctcaggaactctgctgtgctggtcatcaaactctgccattatgactaaaggttcagtatgaagttctggatagatctgtcaaacagtaatatgacaagacgtgagaaatatatcaaccatggaactatatcgccaagagatcagatatatcattctttgttgatctctcgctagtgctgatttggtcatcctggacataattttcgaccagctcagttctattggtgcgggtaagaaaaagcatcggttaagtcctttgagaatatcaagtcagataccttgcgccatgtgaattctacttgaaatgagagtgccgggacttcaatattaacgccactgtcgttaatactatacactctggcgaacaaccatggtcgtgcagcttgaatgtgatatcgaaagactcaaaatccgatgatagctttatgagtgagtagttcgttccgctggaacaattatcaatatggttcacataggacggatatagtgtatcttggcccccgcttgatctgttcaagtatggtgcagccattcatcccatctaggaagcagcccacttcgtatgagtgcagtggcttaatcaaaacggacatggtcggaaaggcatactcacgatgattgcacaactaaccgaaaggtcaagggtgtcaaagaagtgacatccctactgagtctctcgatatctccgggagaccaagaacgcaaattcccatcgagctcggaccccgacgaaatgatcttcgtcattgataaaattcgaatactttgggaagccaaattactccatgtccacgagcgttgtgatcgcccactctttcgggtaatggcgcctcaatttcgacttgcttatcgccgttgttaagtagcgtacatcggcttcatggcaggctccgaatcggtttctgtaagattttgcagtgcgatattaccagaagaccactcggagtttgcttccggggggagcgtgatcaaaaatagcagtaaataaaaataccgattgatctcagcagcgatttgtacgatttcgcgtaattccgtaattgccacgggtataggatactgaataaatatcgctagtcggatctaaaggacctaggttgatactagattagatatgatccggctatcacaccatgggttgcttcgatcagaatctcaaaggataccatcaaacaccaattttgcacacttattcggtattaatacagaaggtgctcgggtcaaaatagaaagagttccaagcaacatgaaggtataggcatgggcagctttgacccgaacgcgcagtcttagatccgcattgagtgcgccacaacggaagtgcagcaaacccaatgtgacaaagaaattataatgcaatcccgagtcctagatctccatgacatgttcttcgtcctctgatcgccctttcccctgtattgtggggatgtggacgttaatctcatcgcgaggtgagtttttcttcgagcaaaaggagaggagaagaaggaggaattctctactagcaaacaagatctagctacggagtaaatagctaggtgaagccctacaatctaggcatcagcatgtgattggtacgtgactgtcataatagttctcgatgtcttagtcctagttgatataatattcaaaaatacctgtagatccctataactggttaaaaatatatataaactgggggatttgacgattcttaatgtcgtctcgagtgatcagccgaagtggtagagttagggttgtcaagggactgtctggctcatctttttgtctctcttaaaatggagtgagctggtaaacttgaagaaatcctgagccccggttgctaaagacgctgaaagagaaagcggtgacgatatccgtggagatctagaaggtggagacccatggaatgtaagtgggccgccccacttaagcttggaccttccgtggtcgtgatagccggatatatcaggcaccattttcacttcatatttacatgattcaggttgttctcgttcttcttcttctttctctctctcttctctgcatttattagatcgtaattccaagattttcaatgcacaccgacagagcaatatattgtcccgaaggctcaaaaaatactagaccgcctgaacacgcagctgccatcctcagtctacctaccacggcaccctctgctcaggacaaatatgcactcatgcaagagtgtaaagacacgagatcaagccacgggcgaacactttaagtatcagcatatagtaggctgcaagccaaactgtgcaagatatcagagattcgacttgtggaagcttcggacagatagtttgtatccaagtttcagttgttattccgctttaaaaaatgtcgagatgagaaaggacataccggagttactattcacataggtaactctaagagtaatgttgtaaggatatgacagggacccagcgaatgcggaaacccacctgtgcaagcaatggcgagccatgtgtatactggaagatggcaactagccttgcatcaaaaaccattggccctttctaatgttatacaagtagtacttggcacagaaggagttcttggacgcgtggacggaggtcttgtgtcacctgtcgacatttatctgccccggtgggttacctgtcaagtcacaatggaaggaacgagctcagaggaaagagcgaaggactcacctcccagtcaattgcgccatcgcacaatccagaatctgtctactcactctgctttctctctcctccctactttcttcctcattcttcttttcacccgttttgtttcccatctaaagcgacacgaacagtagaactcatcaatcttttatcatcatacgagattccaatcatgcctgacccacctccaaagggtaagggtctcgcagtatctgatccagagccgatcgatgagaaagttgtcacggctctggtaaaggatgaggcccaagtcaatggcaacgagttatttgctgaaaatgaccgtggctctgaagatcttgtgattgtcactggagctgatgtggctgctcatcttttgcccctgcgcgatgacttggaccctactttgacatttcgcgctgctatcctgggatccggcctcgcggcctttctggctgtcatgacccagatctacagtgtaggcgaactcgcatatcatctcattcttcattcccacagcactgctaatgaatatacttctagttcaaaccaacccaagtcaatgtctcaggcgttttccttgttcttgtttcctactttttcggtaccacctgggccagattcctcccccgtggtgacaagtttgaggcgagatggagggcacgaggtgagcagggcagactgccttggtggattgctgtcatcaagtttgtgaatcctgggcctttcggtctcaaggagcattcgatctgtgtgatcactgctacagcagccgggtacgtcacggatgcgacgactgtattcgcggcacaaaagttgttctacaatcttcctttgagtcccgcaacggtcattctcggcattatctctatcggcctctttggatgtggcctctgtgggttcatgcggccttttgctgtctgggatgtcgaggctgtctactggggtacgctgcctgttgtgaaatccatccaagggcttcactgggacacggtggaaaactccaaaccactgaaatacttctggtatgccttcacgggtatgtctctttacgagatatttcccgcatacatctttccatggctcaactccgtgtctattccggtatgtattctatcttttagcaacgttacttgcgccgtacctgactagaccccgaatgtctagtgtctggcttcacaaaaagcaactggtaagaagggtgccatactcaccaatattttcggtggtgctacttctaacgaaggcctcggtctcttctctttgtccttcgactggcaatatgtgagttggggtattacgccccagtgatactttatattaaccaatgagactggtcaatacagatcgggtcaatttcaactgctattcctctaaagctgatacttcataccaccctgggagctggcatcagcgccatgataatgattggcatctattacggaaatggctggggctcgagatcactgccttttatggcgagtaaccttcttatggccaatggaacaacttatcccgtgaaagaggtgtttcctggtggcttgctcgacaaatcagtcattgaaaaatatggattgcctcagatcaccggggcctttgcatttggtctgttcacggccaatgccgcagtgagtacaatacttctatcccgaaccacttgctaagcattacctagattggcgccctcattctccactgtatccttttctggggcaagggcatttggagggtatgtcaacaagcaagggaaggtaagcataatgacccacaccacacctacatggcaaagcactataaggacactccgtggtggtgcttcgctggcattctcgtcgtcagctttgtccttggccttgtagtggtgatcaaagagaatatcactcttccagcctgggcatacgttgtctcgctagcactaggagttttcattacgccttttgtgagtattctcgaacacgaaattttacaatgctaatattatgatccagagcactatcctcttcgctcgcttcggcaacggcattgccactaacaacctgtcgaaaatgctggctgggctcatgcttcccggacgcccagtcggtaacatgtatttcgctgcttggtcgcacaatattgtcatgtcttccgtctccgtgtccaacgacctaaagttcggcgaatacatgagaatacccccgaggatcatgctttggacccaaatgtatggcatcatacttggcggattcattaactatgctatcttgacttccgtcatttcagccaacagggaccttcttgccgagggtaacggaaactcctcctggagtggtgcgaccatgcaggctttcaacactaaggcagcctcctgggccttggccccttacttgtacaagctcggtgccaagtatgaggtgattcctattgccgtagccgttggtgctgctgcagtaattgttcatcgggttttctatcaggtcagcaaacctcaagcagaccaagattgttcaactagttcatgctgacaccattttacgttagttcgttcccaaaatcggacggtttgatgtttcagaagtgaacctaccacaactcatccagtatgccggttcttatacatcccagacacaaacctgcactgttctcagtgggttactctgtggcttgtttacccaaggctaccttcggaactaccacccacgcatttacaaagattactcatacgttattgctggggccttcgacgccggaagtctgttggttatcttcattctctctttcgccgtctacggagcgggtgggccatcccatccattcccaacgtggtggggaaacaaccaaaatggacaccttgactggtgtcctgtttcgaagaaatgacaacgggcacaaagtcggtctcagataatggcgcatgacggtcgatcagagtcatgaaatgtcttgagcgcaaatcttttttttccagcgccttcaaacatttgttgtccccctggaaggttgatggtgacaaccttccggtaattggatctgtaatggatccttagttttaacataattttcgcaacggttatgaatttagcctagatgaacaatctaatcgttgcaattatttttcctcgtctatattgggtcgtatatataaagtattcctcatggtagacgtagcgatatagatgataggtgctttttcgggtcttattgatccctgaatgcccgattgtttcctaaaaggattggcaagatatctgaattgctatcagagaggcttaatattcaaggtaccttacctacctcaaaatgaagcttttgacaccatacaaatttatgtatcgcgaccttttatgtggtttactcgccatatcatcacattcttcttccaagattagatgtacagtcggaaaaggcgggagaggccttaatttaaaggtaattgccaaaacgagataagcatcggcggccatatttaagcgatgccgaagaaccaattacaccattgaagacattaatccagatggcgtgtctaaatttccgaatgatgcaactcgcttggaccccgcctctagagctaccccaacatgtctgagtgttatctaacaaatgacaagtcattacgaatacaatattgaattagtaccaacgctaattgtccaatacagacgttctgctagagctaggtcgcttattttgcgattgtcttattcatgcctgcggtcacaacataacaactcttcctaatgcataattgcgtgatagtcaatgcgacaacgtcgcatggttataaaaggctgaagtagaccgtttcatgctctccttgataagtttcccaaggttccgcctttatctctttctacaattccaaagatgtcgataaatggaataaaaacagcgcatatatctgctagtagttcagatggctcggacgaagagtggcagaagagtggacgtaacaagggagaaggtacatttgagtccagggagggtcatcacttctaccggccgattgacagctatgagggactgcatcgctgggatccgaattttcaatggacggaacaggaagagaaaaagattgtcaggaaggtcggttaaattccataccactaatcaattatcaaatgactgaatttggacagattgatgctcgtgtctgcacgtttgcctgcgtgaccttctttgcattgcagctggatcgaggaaacatcagccaggcactagcgagtacgcttctggaagatcttggaatgacaagcaacgattataacttgggtcagacggtttttctggtctgtttcttgttggctgagatgccgtcacagttgctctcgaagagaatcggcccggaccgttggattcctattcaaattgttgcttggagtttggtcgcggcttgccaggcctttttgaaagggcgtggctcgtatttggcctgtcgagctctgctaggattcctagaaggcgggttgtgagtaattctccttcacataatcttaacgtgggtctgaccgtgtttttagtatacctgatacgattctttttctgtctttcttctacaaatctagtgagcttccgaaaagactgacctgtttctggatatcctataccgttgccggaattatcggctcatttctagcctttggcttcctacacatcaaagacgccaacggcagcggtgcctggagatatttattcgcgtacgagggtcttatcactggcatgattggaatcatcgctgcattctggatgccagcgtcacccgtacaaaccaagggaggattacgcggcaaggacgggtggtttacagagcacgaagagaagatcatggtaaaccgcgtgattcgggacgaccctagcaaggggagtatgcacaaccgacaagcggtcaccccacggcgcttctgggagtcgctcaaggattaccacgtgtggccaatctatgctctgggtcttatttggatgatacccagtacaccatcccaaaattacctcacgctacaactgcggtcccaggggtttacgacgttccagaccaacttgttgacaattccagcagctgtcattgcgattatcaccatgatagcaattacctgggttgcggagcgtacaaaccagcgccttctctggggcgcagcagccgaagtctggaacctggtactgctcattgcgctggagttgcttcctcagaaaagcatgccgtggcctcgttgggcgatccttacgcttcttgtcggtggtccgagtattcatcctgttgtggtcgcgttgacttcacggaatgccggatctgtgcggactcgcactgttgcttctgcgttgtataatatgtctgtgcaagtgagcaacattgcaggtgccaatgtgagttcaattccttgttttactctagatatggatagactatttagaatactaacatttatgaacaggtgtaccaagcaaaggatgcgccatactacaaaaaaggaaacaaagttcttattgcattggctgtcgccagtgggttccttttcatcttcgccaagttctactacgattggcggaataggtacatattcagaacttgtaaatatcaatatggatcagctttgctaacttataacagtcaaaactctgcaaaatgggatgctatgacaagcgagcaaagagagatttacctgcgtgaaaacccggtgttgactaacaagaggtacgttgactagcgctgcagaatataactactagcagtgctaggaactgactatggtgtatagaattgacttccggtttgctcgttagagctatctgatcaggaatttcgagaaatttgcaatattggacatgggtgttgcgatggaataaacatgcagatcgctgttgttcatagaaaatccattatagtatcatggctttgtcaaagaaaggaattcatttacgtcacagttaccaagaaatgagatttgaccttaagatagcatgaaataattcaatttcacaagaagttgatatgcaggcctatcgcgaatagtccgaaattgcaccattgtggctggaatgaggttgttcggagaatttgggcaccatacattgatgttacaatatgccatcagggataggcttggacacgtctttcttcggagaatcatgtacggagtacatactccgtacatgattctacatttccttattaattggggagattgtatagatatcaggaccctgaacattcaatcaccgccttcttgattggttgcaataccgaattctgctataatctccgacactgtatagttttctgtcgtatgaagtagttagtgatgacatataaagcagtccaaactacatatgacaaaagtgacttaattttgctcggggtttacataggtatctaccatctcatacttttgtacggagtatggggagtttgacacgaaagcggtgtataaaattgtaaggcggtataactagaaagcggtacgtgtcaaggcaggcattatccaaattaggaaggcggcgattcaatttacaggcagaggggtcagagccaagggggttcatatcaatccccttgatttacgatttattcaaagtggactgagattgttgagacagatcatgcatcattatatgaactcctcattctcccggcctatttaaacctccattcaagagaccctcaagcctttgattcactctctggaatgtaaggtgtctcataagggcgctctgcctgtggagtaatgcgcgccaagtggcgacgctcaccagttgtccaatcaacaattgcagaatgagccgtgacacggttctatttatatgcagacattagttttttgagccgttaatctataatcaggatttcactcacatcccagacaacaacggtcttcggagcccatcgaacacgagcttgataatcaattccccgacccacatgagccagcaggaaacctagaagggcatcgctctcctcctttttgagaccgacaatactgcgagtgactagtcttggtgtaagcacttgcttttctcaaggagcatgggagtatacttacagccaccattgacgaaaagcgctttctcgccagttaccggatgggtgcgaataagaggatgctcggtcttgaccgggtcccgtctatcgactcccccacgctgtagactaaactcggcctgctcaaccccggaatgcacagccttcaacccgtgcagacgctccttgagcgctggcgaaagccgattataggcctcgacttggttgacaaaaacagtatccccgcctacttcaggaccgtcaaggaggtacaagaacgtagtaccgggtggctgctgctcatatgtgacatcagaatgccatgcgacactgctgttcttcgccgcgagatattcatcgaattcccaggaattgttgttccggtgcacgagatgaatctcgggatatccctccggagctccgctagttgggtggatatggtggcggccaaagtatcctccgaaatcgagggcctcttggatgggcagatcggcgagatcttggtctcttaaaggcgacaactttgcgttgggcgacgagtagagcgagttgatcctttccggcagcggtgagcttgcttaactgaacgcctgtaacctcagagccgatggttggagtcaacttttggatcttggagccttcggtgaggaggtctttgaaggaggggtcggcgtcttttccgtggtcgacgtgcgtaaagggttcaagaggagggtacttctctccatagtcccatacaggcaggtagtttggatgctgcatcattgttagggaaagctatatgtgagagactcaaaggtctagccatgacgtacactagcagtagtctttcccccttcctcgtcaattattcttctcactctgggtttggtctcggttgttgaaggagcggcctttacaggaacaacaacttccgcggtgggaacttgagcaatagatggtgccatgttgtgctaagagattggtagattttgacgttggtcaagtttgagcaattatctcagggatctgtaagcaccatccacttcaatatatataactttcaattccatttgcttcgcgccattttgtcgtagaatcacgtatgaattccttggtgtccgatatacgcgagagtgataagcatcatgtgagaggatcagatacacaaagcacatcaacattgatgccgtgatatccgttctatcgaatgactcattcagcatcataagacaacaaatagatcaagcctgacgtgctataaccgacaataacatcatttacttgccaatgggaatggtatagagtgtggtcttggatgattgataatgtcgagatggcgtgatatgatgcaagtgacaaccccgcaaacgactctaggtccatgatagatgcatgccaaactctgcagtagcgatgacagacgtggcatttaaatggaaagagtaagaactcgatggtaggttcattatttgtttcccgcaaggcgggtaaggttgccagtgatgataccacttaccctaggaataaaggcttttggactctttagagagaaaataggcacaattcaaggaagggaaactagagagtttggtatgaccgagttatattgtgatgctaggtacgaagtgcaaatctagtctgtgctatcatgagtggatacccattagactgactgcctttcgcatcttattccacttctgtgttatacgctgaatggatcattgtcgacattaatttggctggttcgactcttggctttcccttggcgcggattaggcaaaatatttcaggatgctagatgtgaccattaggctcgataggtttgactggactgtcagttctcagtcgcgccgcgagttttattgtctccacggagcaggcagcatataattcagtcagatgcgatgatcaaaattgaaggatgctaaaagtaacatgtgaggtactgaaaaattcgcaatcacattgaaagtggaagtcgaaaagtgacttgctgattgaggagtcgatctcgggaaggagttagcattatccgaggccacgtggtctagatcacgggttgtttccccaggttctccttccgagtcacgtgactaccatccacagaaactataaatatctgacttaatttcaaaccgaaaattgtctaccagaatcataggaactccaaatccgatttcatttagaggttgctaaaagtataatcatagtcaatcaatcctttgcttgctccactggtctaaatatatatatctcaagttctctatcagcctatcgttttttcttctttcattctaatctccggccccaaaaagagagcgaacgaaaagaggagagaaaaatatagttgtaaaaaagagtctttgagcatatgatagcgatctatctgtaacaacccattccatctcaagtttcccttttctctcgtcgcccgtaagcttctttgtttttatagatagcttgttcctatttctttaagtatttgtaccccgaatcgcatgtagattcgtaccgaggaattttttcgagactcaactttctaagaaatatatcttcaacatgtcggaacgatacaactttcgagtagtcctcgcgtgttcggagactaccgccccaacaccttggaggaccaccaacagatccaactccacgcataaagctcaaaatagaagacctggaccttgacaaatcctacattggcactttgatgccacctaaacggccaccgaggccaaagaaaaccagaccatggaccaaatggacaggaagcgagcttaccgatccagctaaactttctcgtggctggcacatgaatgaggacgatcttgagattgagtgagacggccttgaatctaagtgtgcaaacaacgagctaatcagaactcaatagcgatgttgatggccaaatcaaaagatggcatgagagaattgccgagaacataatgcctcatgtttttttgccaaaggctggaggaatatatggctacaaaggcctaaaatgagtgagtcagctatattggtattgcttgtgtgcagattctcaccttgttaaactatagccagatgaggttcccggggtctgaagagctcagctgggatactattcaacgggtgcatcaattggaggctatggagacagagctcgcgagtgccggggatgaatacgatcgacttccaaacattgaggctattttggaagcttataaatcgggtaaacttgattggtatactggtctcgttacatattggtcgaaggggtcccggatctgtcaaccaagaccatttgactgggatgaatttgaagcgatcagctcccactacgaggatcacaaaggattatggaccgaaggggtaatcgattcattctgttttccaaaggtaactggctgacgaatgatatcagctcaatatttctgagaatgatgtttcctatggagctatcaccgcaggtccatgtcgaatctatacaaagctgactcgggtgagatccatacctattatggctcaaacctcttccaagtatttctgacttttttttatctagttgacattagcactccgccttccaggagtaccgtgatttgccgagttggactttattcacaatactggctgcagtaaaatgtccatctatcaaggagatcttaagatgcttcttggtccttttggcgggactattgggccacaaataccggtcatctgcatgtcaacgtctcaaacttgtaatggccctgtaaccaggcaatttattgaaattgaagtcacaattcttgatcaaggtcgccagagaatgaccgcttggactagaaccacgtgctgtctcaatccaggaagctggaaatacaagagcatcccccgactagatggcccaattgtgcacgatttgttatatgtggcaagcgcacctgataactagctcccgtcgtttacacatctcaaccacgaagtctgaactggacctgccagacctgcccctcgctaccaacccaggacagtactatgggcaatctagaggtcccatgccagtcggaaaatttgccgatacacatggtggttggctaccagaaatgctcggaacgttggaaatgccgccagcagcagctggagttcctccctaagagacttataaacctgtcattccctcgccgactgttgcttgtccttgaacttagtcttgattcatttgttctttttattgcttatagtgtattgctgccccagtttatcacatttctcaattgtttgttgagcatttctgttgttatattttggcgcaaaccaagacagccaataaaatcactgttttgttatgttagttaatataatgtttttatggagtatgatagtgtatgtcccatcaaggaccgacatgccatacttatgttatcaatttccccctcgcactgacgttggtcatatctagatatgccttggaacctcgggtgtagctatagatgccgtaataattgagatagagaaatatgaggcttgtaggctcatttcgcagtccgtttctttcctatatttcaggtgtagagcaatgttaaatgctaacggtgccgatccaaccaacataggcggcccatgcagatcgtacggaacctggcagtctccctttaacccctcttcctctcctttccacctttcctctcttctagtactaatacttctatcataaatcacttccaagaactttgtataagagaaaattggctaacccacgaatggtgtcactcggtaaacaaatataatgatcttattccttattagtgttgtgatgcctcaggccacgatcgacacagggaagtcacaattcatattctcaagatggagcaatctgcgaaccgtgaaatttttgtatccaaccggccccgtgatctgcgccaatacgcttggaactatggagtagccaagctctggctgaattccagggaaaaagataatttgtggtcgcatttagccccacgccgcttcttatgcgctgcgggtcgctggtctagattggagacagcgaggtggcagctatctcgtctttttttcattttgccttctctttttcaactgttaaaaagaaattctcactgtgaatcaaagtgacaaagatagtctcaaataatgtgattctagctacattttcgtgactttcgcaaggtcaatataaattgcggaatactagcgtattgcaactagtggcaattcatcaacacttgcactacagggtccacagttaattaccaccatgggaggtctctgaaacggagagaacaatacctttgtaggaatttttcccgagttccgtttttcaactctgcttctcccaggggcctgaattttcgagctcaagtcaatcatccatcatgaccgtcaaagagaagacaagcgtaaatgacgcggagctgggaagccctggggactctaccgaggagtacgaggtcttcaagaaaaccgaggatggcgtcagcttccgcagtgttggctggttcaaggcgtgcattatcttcgtgaaggtcctctttgcgacgggtgtgctgtcgctgccagcttcactgtactccctcggtgcggtaggtggctcgatcagtatcgtcgcatggggcgcgttcaacacctactctttcgtgattctgggcaacttccgcaagaagcatcctcactgccactccatcgccgatatggcggaagtcgccggtggtttcttcgcgaaagagcttaccggtatactcttcctcatcggctacgtccttgtcacgggcagtggtattatcggagtttcaacggccttgaatgcgctttcgcaccacgctgcgtgcactgtctggtggtctttcattggagcggttgtgatcatcgcgacagcttcggtacgcaaactccagcatgtgggctggctcacatatgcaggattcatttcgatctatgccgccgttctgatcgttgttatcggagtcacaacgcgcgaccggccggctgccgcaccccaggagggcccttacgagctcggctacgtggcaatcaacaaccccggatttgcggctggcatggtcgcttccagtactatcttcgtctctacggctggtaccagcgccttcatcccggtgatgtcggaaatgcgaaacccgaaggactacaagaaggccctatacctgtgcatggttgtggttaatgcgtcgtaccttgctttcagcttggttgtgtatcgttggtgtggacaatgggtggctagtccgtctttgggtgtatgtatcctatcctttgcctgataccggtttcagacaatcagctaatttttgatttttacagagcgctggacagacgatcaagatggtatcttacggtgttgcgctgttaggactggtcgtcagtgccacgatctacttgcatgtgagtatatccctcgcaactcacgcttccggaactgacttcgctacttagatcgccgccaaatacatatttgtgcgtatcttgggtaacacgcgccatctgcaatccaacaccgtcattcattgggttacttggatgagctgtacggtcggtctcggtgctatttccttcatcctcagcgagactatccctatcttcaactacctggttgccctaattgggtccgtttgcttcgcgcctctggccatgtgccttcccggtttcttgtggctacacagcaatggtcattaccgaaagggcacactgatgcagaaggttatctacctgctgcactggggaatggtgctcctcggaattttcttccttgtcggcgcgacgtacggtgttatcattcagatcatcgatgcctacgcaacgggaatgattggtatgttctgctatacccgcaacagtgtagaactgcgactgactttttttattaggctccactttcagctgcttggacaactccagctcgtcgtaggtatgggtctttacagtcgactgcttagggatctgcccccaactggagtggtgatatatacgctcaacatggtatggatggttatacaggaattatataatgagggcccgggaggtcataatgtatgttgtaatgagctgttatggaatcgtaacaaattctgttttcctcgcgaaactctgcaagccaaacgctaatgtaggtactgtctccactaattcccaaatgcggtccctcgtgtggctcacggacgcagttccgcgaccccgggaacctacttctaactacattcggcctgacttttgtctatcaaaactttaattccttccaacgttcccgcttagaatttttttccgtcggacaggagaggctcttgtgccacatcccgaggtcctttcccagctttcatgacacataccattatgtatttcagtgttaccgaggtccggctccatcgcaaatttgtggtatcccgtgtggatccacccgcgttccacgaccttgaagttcctggcccaggatgtggggacaggaatccacgatgccttatcgcagctgctagccgctgttgatcttgaccagctcacggtacgaaggcttcattcccgtcccgcggcgctgataccattgcgggtcttcactccacccttggttcgcgtggaagcgaaggattccgggatcaaatgctcgacttttatcattgagcagaattgggactttactgacttctagaaggctgtgggtaccaagcaggtggatggtgataagaagggtatgtttactaggatggcgacatggttcgaaagcgaggtggacgattgatttttttcagcttaggtatgtgactttgtctgattatcaagaccgattaaactaaagtttgcctaagtttacgccttcgatctttccttttcacacgcggaaaatatatatagccgggataccaggcaaggtcccaacacgatcacgtcaaaacatctttggaactaatagaatggctgggtatcatattggcagacctgcagcggaaataaactcctgcatcaagatgtttcatgaagatggcttgtatataaggacattctcaacaccttgacggtaactagatccctaaacgtacatgtagattcaataacatactgctcgtagtcatatttatgccgactttccctcagcagaatcccgcggttgagacaccgaaagagatcgctgatcgttgccgcctttcgtccgcccaatgccaaccatctgcaagatttcccgccagaagccagtaggggggtcgaggaagctatcctcgtaggcatcgatcaagggtcgttcccagacaaggtcggcttcatgggccttgacgaactttgttttcttgatgattttccagatgatgaagaggggagggatgacgatttgcatggtgtagttcgaccagaaggaagacacggaccaaggcttgtatgaggtgtaaccgtagacgatggtgacgatgatcatccaaacgaatgcaatgtatgcacagtagggttggagtcgtccataataggagagggaccggcggtcaagcccctgcgctttgcaagcgcggtggaagaagatgtacgtcagactgatgacgatgtaattgatgagacctggttatgttgtcagtattgtaatcagtgttgggtagcacggattgcatcgtgatttcttacctccggcggtcaccaggctagcgaaccacgtgatgacgatggacgagctgctagaacactgcaagaaggaaagcatagggaagatcatcacgatcaggaagcaatagacgggtacaccgttgcgcgtagtgtaggtgagcactctcggggctctcccttccagtgctaagccgtagagagtacggatagcgcagtaggtgtaggtattgccagcagagaaaatggaagtcagcaagaggctaaaagattacggtcagttttagttcgtcagattcatgttattttcgatggcactgacgcgttgatgatcgaagggaagattgaaatgcccatgtttcgcatgccaatgacatacggcgatgccgaagcagaaccagaagaaccgcccgtcacgaccgccttgagttgcggatcattagcggcacaaacgatacccacagccaaggcgccgccaataaagaagagaccgaagcgaatgtagactgtcttgaatgcattcttgatataaatgcggggacgctttgcttcagctgcgaccatggagatatactcaggaccgacgacggcaaagcaagccgaccagagagatcccaagaagccttcaaagcgaccaagggcgccggtatccagatattccatgaaagagcctgggttgttccagtggcggaatccataggcatcatgggtcgggtttccaccaaccatggtgatgaaggtgaaaaagaacaaggagaagatcagaatgacctttccaccggacagccaaaattcagcctcgccataggctttgacggccaagacgttaaggcatctttgcgagaatcagtattttgatcagacttgaagtgtgtaaattgccaaaatgggcggaagaggttctcacccgtagaccacgatgacaccagcacagatgcctgcgactggaccaggttcagtaatcttctcactccagaaagacaagacgagcgtgaaagccgagatctcaaaaggaatcaaaagggcctcatagaagctaaaagaagtgttagcaaagacagcaggcaaggtttcggcgaagccgaaagtgggacaaacaaaaagttccagccgaccatgaagccaagagcgtcgtcgacccattttccagccaagcgaatgaaaccaccactgacagggaaggcagtggtcatttcagcgagacagttattcaccatggccaaaaatatacattgaacggtaaaggcaatgaacaagctgccaggtccaccgtggtaaagaccggagccgatgctcacgaaaagtgcggttccgatggagccaccaatggcgatcagttggatttgacgatttccaagatgtcgttgaagattgtcggcattttcagccatcacgccttcttggacatctcgaggaccgccctcggttttgaggcccagtgtttccatcacagtgccgttcgattctttcttttctcctaggatagccatattgctttcattcctgtctgcggtgttaagtgggtgatggacgatacggggtggagaattcgcaagcgggagaaactggatgggctgaggtcgcttattcgtctagattctggggtaagggttctgcaaatgttggggtggatcggcggaaatccgggggtggatctgctacaggatggtgggatgccgggctgtgttgcaagggtctgggatttgatcgcgttgtgggcagtgattttgtcgctttggatgtagaaggtgcaatggcaaggcaaatgtcggagatatcgagttagggtaggatttccgtccagtacggagtttagcggagaaacgttgaaactttcctcaagaaaaggatatttggagaagtaaaaagaaggatgcagtcagaaagcgtgaaatgtaggcagcgaaagacgtctaataaagaaaatcagggccaaaacgtggaagtaaaagaggaaactcaaaaagatcgaggttttccctcgaggtacgattagccctaacgcaacaaccccatgcaagccatctaagccatacagaagccatcccaagccataccaagccattatgacgcgcttcggggggttactttcgatatctcccggcgctgattggctcggaatacatatcgcccccgcacgggctgccacttaacccggatccggacacgagccggggcgtggatctcccctggccttttatcttggactcgactacctaaacagtcttagatggactcctcggcgggttatgtcccccaactcagctatgtattacgctcggcagggtgtcctagtctcggtgtgcacgtgcccccagctaagactgcattttaacctcccggttgcatccaatgtctcaattgatctgagtttggaattgtctaactacggagttatccgtatattctagtcttggcatccttgcgtgactggcttatcgtgtgctcggtccttctcacctgggcagcttcgtctgttacgtaaccttgccagataatcttggaaccttggaaccgttaaccttccaaggaagtgccaagtaatcatgagcctgcaatacaaccccctggacgtaatgtagttcgatctgagtagtcaatcgacagaacttggtcgcatggtggatacgtgcagatgccaaggcacggttcgaatcaggtttcattggtcaacagttttgcctctcctatctcaattcttcttctcgcactgggcatatcatgccgactttctctttgaggcttggaaaagcgtagaaattgttgggaagataacgcatttcccctcatatcagacaatcaaatcagacaatcgaatcagacaatcgaagtatattgctcattggtctgatatccgtgcatctctctctttcctctttggttcttatgttagagaagaaagacggtgtgcttgctgattttcttgccgagtgagcatctttagtacagattgtgtgcctgtacctgcatctagaattcatacccctgatcaatggatgaggtcgtagagcgagactcgatcttgccctagcctgtcacatagtaagtctcaatcgacaattagttagtcgaacaagttttgactcgtaatgtttaattttccaatcactgtgtagtacaaagcaggtactccctcttatacaaaatgtcatacatcgaagtgtacatcaatgtggttccacgctaatgagacaaacctggggattaatttgcagatcacgtggccgatttccggggttgctttgaaattcccttgccacaagaggcttgacgaccaggaacacgggatcacgtgataccgctccttgtcgactcccgaggtcgggggacagaaaaaagtttgcttagagttgactcaccaatgtctccgtgttcgatgttgttgaagcgcgtcgctaggcctccggccaccatgatgtgcagaccggtgagtacagcttcctctcatgatcacccaattcaatctgactcccaaaggttcggccccggtggactccgtccttcggcgtcccaagcaggacaatccatcatcccctacgatcggtctcgagatccctctcttctcgttcgctgagcacgacagccttcacccaggccgaaggcttccactcacagcaagagaatgcttcagtgcctttttctgagactcccaccgagagacgcacgccgcaaaccttgacggagaagatcgtacaacggtatgcggtcggtctccccgaaggaaagctcgttcgcagcggcgactacatcagtcttgcccccgggtattgcatgactcacgacaacacctggcccgtcgccctcaagttcatgtctatgggagcaaccaagatcaaccgcccagagcagattgtcatgactctcgaccacgatgtccagaacacgagcgcagcaaaccttaagaaatacgagcagattgagacttttgctggacaacacggtatcgacttctatcctgcgggccggggtattgggcaccagattatggtcgaagaaggatacgcatggccgggtagtatggcggtggcttcggacagccacagtaaccattatggcggagttggctgtcttggaactgctgttgtgcgtaccgacgctgctagtatttgggcaacgtcgcggacatggtggcaaattccccctgttgcgcgggtgacgtttaccggaacgctaccagtaggcgtcacaggtaaggatgtgattgtcgcgttgtgtggactcttcaatagcgacgtgttgaaccatgcaattgagttcaccggctccgaagagactatggaaagcctccttgtggatagccgcctgacgattgccaatatgacaactgagtggggcgcgctcacgggtctcttccccattgatcagactctgaaacgctggctacgttacaaggctaccgaggcagcgatgtctgaggaccgcacaacccggaatcgtatcacgcacgaaagaatcgacgagttgttcgccaaccccctcacagccgaccctgatgcccaatacgccaaacagctctacctcaatctctctactctctcgccttacgtctctggtcctaattcagtgaagatcgcaacaccactcaacgagctcgttcaaaaggacatcaaaatcaaccgcgcatatatcgtctcctgtacgaactcgcgtgcttcggacctcgcggcagccgctaaggtcttcaaagacgccgccaaggccaaccccggcacgactcccaagattgctgacggtgtcaaactctacatcgcggctgcttccgcgcccgaacaagaggccgcagagtccactggcgactggcaggccctcatcgacgccggtgcgcagccgctgcccgccggatgcggaccttgcattggccttggaacaggtctattggagcccggtgaggtgggcattagtgccagtaatcgtaacttcaagggacggatgggctcgagagatgcgctagcatacttggcgagtcctgaagtcgtggctgcgagcgctctcaacggcgttatctctggccccggctcttacaaggtgcctgagaactggtctggcgtggagcacggattcggaaccggatccgaacctaccaccgagaatgagctcaccaatattctacaacagatggaatctctgatcgatcgggttgagtccgccgcagacgagtccaagcctgccacggagattctgccaggcttccccgaacgcatcagcggcgagatcctcttcctcgatgccgacaatctcgacactgatagcatctaccctggtaaattgacataccaagacaatgtctcgaaggatgatatggccgccgcatgcatgcagaattacgatcccacgttcaagggaatcgccaagccaaatgacatcctcgtcgccggcttcaacttcggttgtggatcctccagagaacaggccgcgaccgccattcttgctaagcagattcccctagtcgtggctggcagtttcggcaacatcttctcccgaaacagtatcaacaacgcgctcatgggccttgaagtcccccgacttgtcgagcgcctccgtgccagcttcgttcagccatcctctggcgacgtcgcgggccgccagctgacgcgccggacaggctggactttaacgtgggacgtgaagcgtagcgtcgttgaagttaaggagggtgagacaggagagacctggacagagcaagtcggcgagctcccagcaaatgtacaggaaatcatcgccgaaggtggactcgaggcctgggtcaagggcaaagttgcggagtcaaagtgaggacttattaaccgggccagacgagaacatactgatgtcctcgccttccaggtaaccaccgccatacttttgtctcttgtatgattttgcatatttacattttgtactatttttctatcatcaggtaccatagagaaggcttgtgactgccataacaagtcgtggacaaaaaagtctttttgcatagaattgatgattgatcgttcttcctccttatcgacgcttaaaatgcaatcacataatgagatcagataaatacatctgttatacagccctttttcagacatgagatgtttgaatagatgagtccatcatcctcaccaacctcatcacggcgcgctagccatcttaaaacaagcaaaagcggcaacagccagtgacactgcgctcagaaatgcatctgtcccaggtccgatactactcgagagaaagtcgtcgtttaccgtatagcgcggtattagattgaacgttgttgcaattgccgaccatcctgaaatcgctggaacaaccaacgtatcggccattccaaagaaatactcgaatggaagttttgaagtcgacgatagggcaaacgtcaaagcgagagagtacaactctagaaggcgataccggcgtccagacccaaagcacggcaatgtcaagagaacgaatcgatagcatgcgtgtgcaaatatccacgatttgctgacggcagtgaagacgaacaagttctcgtgaactctgactgtcttccatccaacgcggtgtcctttttggacgatccaaacgaagagggcaacgcaggtgattttgctgcacattccccgaagggtgccgcctgtgggagtcccgaccatcatgccaatgtttgcgtacaccgcaaaattaacataggtcgtaaaggcggacagaaatttcgtctgcaaagaccgatccgcagcgaggaacgataggacagagccgaggccgaggggaagtaaacacatggttttggtcatttcaccgagagtagccgttgtgttaaatatgaggatagtcgcgctgaccccaaggacgacgagcaaaagcaggcccgggtttcgaacagcacacccataagtgagaatgaggatgatggtaagccatacgttgaatgggatatcaatgtacggttcaaacgccgtaagtagttgtgagaaagccatgagatgagctgcgtagttctatctggagctttgactggagcttccccagctgtcgtgcggcccacgcctagctgtgctctcagtatctagaaacagccagttggattttccaaaacgtgggaacaaattgaacccgagaagagtttactcagaaattggctatgtccgaacgagagatggaaaagaccagcataccgcccaccatcgacttcggagaatcgtttttacgcactacagtcccacaaaactttacacacgcctctacctgttcggtggccgagtcgtattccaacttgcaagattatcgtgctgtcttgtggagcatggtttgtatggtaggcggatttgcccgaggctaaaagttttactatgacagctgtttgaactgtttgttggccaaccactgtttgatatattgtttctaacaccctatattctctttggccagatttgacagatggcaaatgatacgatggatgtaggggaaagcaagaccaagaagcatgggcccgaagttgcaagaatggttgaaagaattgttgcggagcgaagcgaagcatgtataaatcaaaaggtcttatgtacgtgtcacgtggccaagttttctcctagctgaaacaatagcattctaatgttccatcacgtgaccaagtaaggtcacgtggcatttggcaaaatatctccaaacctgccatattaacgcggccaattaggaaacgacttgacaatttcatttgcttgaatctcccagaaaaatgactcagaccgatgcatcctgtgcgaagggaatttacgtcgggttttattttcaatgctgataccaattctgagacaccattgaacacccgcagaaagtacattgaagaagacgccgcgatgaaaccccttagcggagatgaactccactgattcatatcgatttcaaagatctttactgggttctcgatatgaagctctcataacctaatttcaagcacgtgcctagagactattgacaggtggtaatgggtgagaatcagaaaacacggtgcaggatctctaatgttggtactgcagaatcaaaagcaacgtatgacaacctctagagaaatccacaccgatgagaagaaagaatatgtatatgttcctggatgatcgatggacgggagagatacaaagtgacaggagtaagagagaaccagagctatgtaggtgctatgtgtgtgcctatctggtctcaaacaataccgaccatactcatcgaagcggcgggttgtagtgactttaacggggagtgtttacacttggacccagaagggcaaatatgtagaccaagggcagtgtgggataatgatggttaattgagactccttcttaagccatctgcggaagactcaaaagttgacgcgttgcgttaatacacaataccttgatatatcatattgctcctatagcaactaccaaaataaagccctacttagatcagatgtttgaacgagaaagtctacattgatataatatttcgagagagcgatggtgtcgttcagagacagacctactcacagcctcctctcacaagtatcacttcacctcctgaggctctcaacataaccatctgaactaaaagtcagaacctctgcattatcatcgaggtcccttctcaactccagcgctttggcgtaaacaagaaaggcttgttcacgcgaaagaaatactaagacaactgaagttccattcaaaagtacaaatgcagattagaaacttcatgtattattttattggaaaatatgtgccctatttagttatgggtgatatggacctgtgtgaagaactcgatccgggtaaaattggattacatagttggatacgtatagagtcattcctgcgattcgcaacatggaccggtctgatgacgacagtaaattatgatttagcattcaaagtctcgcgtgaccatgttcatattactatttgcgttgtggcaaaatcgtgttattcttttctaaatgtattgatctaggcttgtgtatcatgggagtcaattacaaggcaatgaataaggaaagtctaatctagtgttataccctagttgttgcaatgctggcttccagtagatacatgcatgacagcatcatttgcattggaattctctggttttaggtcttgtcgtatgattttaatatcatttccactcacccgtctaagaattggggctaggcccagctggacactagatgataaaacgaagtataaaatacaattcgttggctgattccggctgacgcaatgtgacccattgtttgggtttgacaatacaacgacattgcttttcaatgtttctgagttcggtttataaataacctaacgacgatatcggtcttctattcagatattcatcgttattcattattatcggtcaagctgttttttgactgatttcgcctactataactctagaaacaaacctgtgattcatcgatttcgtgaaacaaagagccttcaccaccgataacgatcatggcaggaactgggaatacgaaagttgtacatgatatcggaaatttggttgttcattttgaacatctaacgcgcagtgatgtcgccttggtcggagggaagaactcctccattggagaaatgataggcacccttggaggtgaaggaatctctgtaccttctggttttgccacgacgtcgctagcatacaggcgctatatcgatgggaacaaaatccgcgatggaataaccaggctgatcaaggactggcaaacgggaaaagcaaatcttgccgaaaccggcttggcaatacgcaatttgatactccgcggctcttggccacccgatgttgaaacagccatccggagagcctatcacgaactctcggccaaattaggaattgagaacccgagcgttgccgtgcgttcaagcgcgacagcagaagacttgccagatgcgagttttgctggacaacaggattcctatctgaacatctcaggtgaagatcgattgttgaatgcctgtcgccgctgctatgcgtctcttttcaacgaccgcgccatcagctatcgccaagccaaagggtttgatcacatgagcgttgccctctcgattggcatacaacaaatggttcgctccgatgccaacgggtcaggggtcatgttctccatcgataccgaaagtggctttgacaagattgtgctcatcaacgcagcgtggggactaggagagaatatagtacaagggactgtcaatcctgacgaataccaagtgttcaaaccacttctgagagatgagaaccttttgccgatcatagagaaaaaatgcggggacaaggcaatgaaaatggtctacggggaagatgtaccgacgcggaatatacctacgtcaaaggcggagcgcgctgcttttgtgcttggcgatcaggaaattcttcagttgagccgctgggcatgcaccattgaaaagcactatggctgtccaatggacatagaatgggcaaaagatggcatcacgggcgaattgttcatcgtccaggcccgcccagaaaccgttcaatcgcgtcgtgacgctggtgtcttcacgactttccaggtaggaaagagaggccgcattcttacgaagggactttcagttggagacgcggcagtatctggccgtctctgtctcattgaaaagtctgaagacattgacaacttcgtcgacggctcgatcatggtgactaaatcgaccgacccggattgggtgcctctaatgaagcgggccacggctatcatcaccgaccatggtggccgtacttcacatgccgccattgtaagtcgcgagctcggcctcccagccgtggtgggcacaggaaatggaacatacgttttacacacaggccaagacgtaactgtttcctgtgccgagggtgacgaaggcttcgtctacgagggtaccagcgaaatttccacccaaacagtggacctagccggcctcccagcagttgatacggatattatgatcaatctcgctaacccagcggcggcttaccgctggtggcgacttccgaccgatggcatcggccttgctcgcatggagtttgtcgtaaccaattatattcgaattcatccgatggcgctcgtccactttgatcagttaaaggacgacaaatccaaggaagaaatcgcgcgattgacagctgggtacagtaacaagcctgaatacttcgtcgacaagttatcgcacggttttgcggccctttgtgccacggtataccccaagccggccattctccgtatgagtgacttcaagacaaacgagtatgctggcctcatcggcggttctcagtttgagccgaaagaggagaacccaatgcttggcttccgcggggcctcacgctactattcaccgctgtacaaagaggggttcgagcttgaatgtcgcgccatcaagaggctgcgcgaggagatgggcttcgcaaatgtcattgttatgatccctttctgccggacaattagcgaggcaaaagaagtactaaaaactatgtccgagaacgggcttaaacgtggtgacaagggtctccaagtatacgtcatgtgcgagataccttccaacgtcatcatggccaatgaattctctgagtacttcgatgggttctcaatcggttcaaacgatctgacacaactgacgctcggtgtcgaccgcgactctggtgagctggcaggcctcttcaatgagcaagacgaggctgtcaagtggatgattgctcgggtaatcatagttgctcgcaaggcgggtcgtaagattggcatttgcgggcaggccccaagcgatcatccggaattcgccaagttcctagtggaagccggtatcaactcgatctcggtcagccctgacagctttgtccaagtgaaaagacaagttcttgagagtgagaggaaacgacttgatttgatagcggacgaacatatcatgctttaatattaaagggatatcttttcggcgagatttttttcaaaacaagtcaaaagttcaaatccattttgtatcctagctttgtacctccttactcctccgtccacacactaagatgtcttcataaaatttttgtttcaaatgagatctcaccttgatgaccatggttgcgacgctttgaattttttttcacgcttattgattctcacggactctcttgagtgtatcgcttagaatctccaccgagtcgcgtatatcagccttctcgttactatttgttgccatttcaacagtccttatgattccgcttcttccaagggccgcgggcaagctgaaacagcaaccccactctggttggaaatggctaataggatagacatctcgtttgtccattaggatcgaagagcagattctggacagggcggagccaattccaaaagatactgttcctttcgcttggataatcctttgggatctgtgtttacactcgttggcaagatctttcgggttgaaagtgttgctgggcagcgctttgtcaatggggaccccgcaaagtgttgccgtcgaccatgcaacaacctctgactccccgtgcactcccaatacctgaagatctattgcatttgcggcgacctagattccaattagccttgccttgaaagaaattgtcgaaccataagaacatactccggctttgtctgctaacattccgcgaagccttactgaatcaagaaaggttcccgagcccagcacctgagaggctggtagtccggaatgctcttgagcgaaggaggtgataaggtcgacggggtgtgccacgatcagtaagattgtgtctgatctgaatggcttcattgcgttggtgatgctctgaataatggcgaccttctggtacatgtgctggatcgtagtttcgcctgctgaataattagaaaaaatcttcttcgtatcgtatctcctacctctgtaagactttgatccggcggtgatgaccacaacatcgcattggcctgcttcatggtgtgtggctgctcggacgcgggttccgctattgcaactgtagcttacatcggagaggtcccgtacctggccgtctctcaagtcgggtttggtatcgaccaagagcagctcaccagcggtggaatttaggattagcgcgtaagcaagagcggcgccaacctggcccacaccgattattgcaatccgagtaatcgcgtttgaatctctagagagcatattgcggacctaagtagagcatacgacccctgtggtgatctgaagattgttaagaggcgcttggattgtgtaagagaagtggaattccgtttcttgcgggatgatactggtttatgtggtaacgccggtaggttggagctttgttccaaaacttgtctatgatatcatcagtttactatccagttcgtagctagcgggcgaacttagattgctaaagattcagaccgagggttaacctcagagtaccaaatttgctaggagtacatcgcttgatggttagctttactataacgggaatgaggaagctataatcgtctagccccgtctgcgtctactaaccacaagaccttaaaatcagaaaatgctatttctctaccatacaaatagtgccttcatccttgcatccaggtgtagcgaaagatcgagtcaaagaaaacatatgagcaggaaatttaatgaaatactcaaaggtataaagtatagatagagtgatgggaacagctgttgagggataatacattgttacgtaggtggaccttaccgatcaccaatcatcgaccaaagatttaggaaactatgtagagttagggaacgaatttcttacgtcataatgtgatgacaaactgtacatggatatctccaatggaatcagttcattgattgaggaaagatgagaacggtcgaaggctcccaaaggtctatatcatcgtgacgcggtatattgcaatgctctgaaaacggtttaaatgctagatagtagagagtgtctaattgattaaatgcgaccaatatttattactagttatagcgtaattatacgaaggagttaggacctagggtgaaaactatagattatgtagcgaaatgccgcataaacccaaaatcaaatttggggattgttaacgcgacacccctgcctgatttttcagtattcaatcttactaatcaagcatcgatttaattttgccggacttaattctggactttggaattttggtttacatagtaaaaaacatgcattttgatgagaagaaaatttcattgcaatagattgttacttaattttgttaagggtttacatacaaattgtacagtggcgttgcatgagtatttgcaccccggtacctctaccattgaccgctctgtgaataccgcctgcctattcctattattataggagccacccgcatagtgcgactggctgggagtgagtacgaagtttttccggcagaaaatagggcccccccccgaagtactagggtgcaaatactcatgaaacatgactgtatgtgttctgggctgcgcagctcggccgggaattacgttaccctaaattaggcggccattgcgtagccaccctttaaccaagtaaacaatcaaccaattaaataattaaataattaaaccgcggtatagccactatgccggcgtaagtacctattgtacatgaggtttgataggaaggcggtaagaaaggcgggcaatggtggcccgaaaagtcaggcaggggtgtcgcgttaacaacccccttaaatttcagacgaaaccgattaagcaaaccaattgatcagacaaatttgcgtatttacgggtagatcagacgaactggtaaggcaatcttctagcttcatgttttttattagaatataaccagactaaataagcgattaaaaaccgcacgatcaagggagctttgtgttctggctcccgcttgcagcacattctagtcggtaaattaacccgacgaaacaaacaccttcatctgcttcttggttgctttcagcaagacagctaaaaaaatcaagattgaaactcgtcaatcagatcctgcacaatctcacatctcgaggtctttgcaatgaccttggggagcggccatgacctatccgaccgttagtacatttgagaatgatcgttctaacggacctcggtgctacgacacccaccaccggtaatattagtgtatacatgtacgcaatttgaataaatgagattaacgttgtgctccggattcaagaccgggatcaagttctcgttgtttgcaacaatgtccaacgcaagggcccgctgttttcaacgggagaatgcgaggaatgcgaggattgtgtggcttagcaactatcaaggagttcagcacggtctgtttataatgctgcagggaggcattttctggacacgtttttttttggagaaagtctttcgcttcaatatcgggttcatactccaaccaactccacaaaatgacacacacgaagtccctgttcctgactttgatgggtgctgctgctctgagtcaggcagctaaagttcattatgatcttgacctcacatggaagaggggcgcaccgaacggagtcgagagggagatgatctttgtcaatgatcgttttccaggcccgccattgattctggatgaaggagatgaagtcacagtgggttgtcctgctttattttcaaagcgcatactgagagaaatagatagacgtgaccaacaatttgcccttcaatacatctgtccatttccacggcattgagtagggcctccggaaattcctcttcgattaccgcacaatactgaaccacaacaggcaaaccaacaccccatgggcggacggagtatcaggactatcgcaatgggccatcaagcccggtgacaaataccgataccattggaaagccacgacctatggtacttactggtaccatgcccacgacaaggacagaataatggatggtctctacggtggaattagaattcggtgagtatgcagcagcatgtatttattatgtctctaacaaggaatcagtccgtctgccgaccgagagtcaccattctcaatgatttctgatgaccctgccgatatccaggcaatgacaaaagccgcccatgatgcccagttggtcgtgatgtctgactgggaccatctttcgtccaatgaatacatggatgcactgaaagaaacaggctatgatatcttgtaaggacccaaatatgatagccaaagaagtaccgcactcacaatcaccagttgctcagatagcattctcatcgatggtgcaggctctgtatactgcaaagaccctgaatatttgacaaacctccaaccaccccaggtcagagcagtcataactgagcctttgacggataaggggtgagtctatactttactaggctgatttgaaagccactaacacttgccagatgcgatcccttcatgccagttctccaaggtaactgggagcaccacccagagctccttcccgagggattgaactccggatgtaagcccagtgagggtccaacgtcctcctttgaagtatcacccaaaaaccgatgggctagtttgaacttcatcagtgcagcaagtctcaaatcgttgatcttctccattgatgagcacccgatgtacatctacgaagtggatggacgctacattgagccccagcttgcgcatcaggtttccatttacagtggagagcgctactctgccatgatcaaactcgacaaggaacccggcagctacacgatccgtgtcgctggtcatgataaccaggtcatctctggctacgctaacctcgcctacaagggcggtgaacataacaagcgcgaatcaacggcatatatcgactacggtggcactaacactacagcctctgtgatcaatctgaacacaacgaacctgccgccatatcctgctatcctacctgcggaggacggcgatgatttccatctcctgacccttggacggatcaactcatcctgggaatggactttggatgggacgaccttcctcccagccaatttgaaccaaatggaaccagtgattctcaaccccaaagcaccgagcctggattctgccctgaagattgagacccggaatggcacctgggtcgatattgtgttccagctcgccatccccgacccaaccaagcttcagccaccccacccgatgcacaagcattccaacaaggcctttttgattggcagtgcaatgggcaagttccagtggggctctatcgcggaagcaaaagcaagcagcccggacagcttcttcaaaacccctgtgtatcgcgatacatttgtgactgcgccaaatggagtggcctggatcgctattcgctaccaagtcgtgaacccaggaccattccttttgcattgtcatatggagacgcacttctcgtcgggtatgggcatggtcttgctggatggtgtcgatgcttggcccgaagttcctcctcactacctatagtgtgttctatgatttttctatcctgtctttgatgtatgcgattttatctttctaattggctccttaataataatcatctgccaacgttcaacctgctactaaaataccactgacgtcattgtttgtttatggaacgggctctcgacctacatatcggtgaatatgagtttaggccaaagacggtagtgggactggcatcatcatcggactcgtagtcatgggtaacgcctaagctccagaaacttggccacgtgacctcatctggtcacctgactatgcatcaaacgggagaaaacttggccacgtgacacgtacttctagtttgcctatacttgcttcgcttcgctccgcaattaaagcagtggaaacttctagggtagggggtgcaattaccgtaatttacggagactcataggaggaacatggataggttgaagtcgagcggaaagatatcttaatctggactattgcatttggagtaggggtaaaactgatttcgaatatcactgtaatccttttgatgactgtaattaggtagcttgtgagctcactaataactggcgtcctaagatgaccgacgttctggttgattctattacaatgtaaactattagcctcttcctcaaagtccgtgcgacaactctctacaaggagacttccacaataggacccttgtagacgtgccgggcgcgcacgacatagtatataattgcgaggaagacgctgcctcctatcgccagaatgctccagttcatcgtctccactgtcgggtccattgtacttggccagaagctgaaaaagatgacgatgctgatgtagatgatcgcatacccgttgatcagggtaccaatgatgccggggcagtggaacggtccccagacaagcttcgcaccgggaacattgacaatatcatcctcgttgtcgttatatcgggagatgtcaccacggatgcggcggtaaaagagcaaaacagaaaccattaagtaagaaaggtatatacccgaaactgccatggacactatgtcctccatagcggtatcggaaccaatgttaatcagggaaagcaacacagcgacggtcactgtcaataggatggcgaaaatgggcaactgtttcgtggaagaaaccttgaatagcagaatgttagtccatacaagacttctgatgatagctaagtgcttacctggctccaccatcgccacccggggactcccctgtctcgagaaaaagaccaaagctgccgagacgccgcagcaagtaggcccatgagagaacagacataaatggtgataacgatagcacacatggccaatgaaccaggcaccgagtttgttgcttccatgaagatgcccatgaagttatacccagtggcgctccccagcttaccaccgaggtcagagtcggtgcagaacatcataacaattatcataccaaagccgaggcagccattgataccgacactaatcataagggcgttgggaataacggtcgaggcatttgcgacctcttcggacatctatttggaggtttattagctagagacgtggaagcataactcccaaagaaacttacatgcacggcggcatcacctccagcgaaggcaaaggcacagctggtcataccaacaaaccaggatagtccttgcgtggcgaagcctcctccattttggaaagatagaaaaacctgctcctttgtgttatgatccgccatatagatgagggggattatgatgccgaagaacccaagaatgtgcacaaccaaaatgatcacctcgatgcggggcagcaagttgccggggagcaagttcacgaccaatgcgagactgagcgaagcccaaacaatcaatgttccttcccagggaagagcattgtagaggttatttcctaggatcgcggcaccctggatcatctttcctgtcaaaaaggcacaggcggcgaaggcactctgccagccgagaacagcaaaccatcctatgggcacaagtgtcagcgataatgaatagtttcggtccgagtatgaggtagaagtttacctgtaataaaacttaggaatttctggtgactgcccggggcaagcatggcagcccagtggtattggcctcctgcggtaggtgccctgtttgacaattaggtccgaatttagccgtaaatcaacgaataatgcaacatacatggaggccaattccgacaagaccatgaaattggcgaaacagccaacccacccgaagatgtaggcatagatcgcaccgccggagccaccgctgatatatgttagaaaatgttgcaaggcagcaggttgttgtcgggtgaacacactttgtcagagggccagtaaaagtactggagaccgatcagcgatgtattcagtgaaaatttacaattgaactggctcacccaagcagaccttcccaagttcccagaatagtacagctgaagccaaggatcgacagaataccgaattttcgctagtcggaagtgtcagtagtatggtcaggtgagttaccttgaagcctgtatttcataccttaaggactggcctctttcccatccgctggagatgcgcattatcacgatccacctgcccctcgcccctgctggtgacggaagtattgctcttcaattcataggccaccatggcttttttgtagaggaatggaatggagacaagtgggaagtgaacagaaagttaaatataagatgcagctgggttgaaagtacaaaaacaggcaaggaaatgtccatcgcccaagtatcggaatgcgggtggacgagtatccgatttgactagatgggtgtacgttacatcgactagaactgaaagtacgtgagtggatgacgctaatgtatgattgttttgatttgattgcgggcgctctgcgctctgcgcttcgccccaaggagggctagggcccatcgtgttctatgtgtcgatcgtgtggatcacacgcgggaatgattccccaggaagcgcagcatacccaattgaatacgccacagtcaatcatgtggggcatatatcggtgattgctacccatagggcaacagtcaattgatgcttgtatgaaactgataagggcagatatgaccatactcggccctaaaaaggtaccttgattttgttgtggtctagtagtaaaatggctgtatcatattccacgggttgacctaatgcgaggggccgggggccagaactcaggggtgaatccttcgagtacagggggttgaacgtgataagtgtgctggatattaccatatcgttttacaataattagtcactgtgagaataaacactgatcagtgtcaaagtagggaaaatgtaatgtagaaatcagagcaaacacatatagaacacatatagaacacaatgcatatatagagatcgatggactggaaacacaagattggaagccctagaggaactataacatctctttgaagatcttcatatgcatagtatattagactgataggtactggaatgggattcgcatcctagtcgcttttttctgggcactatacggagtaccagacgatataataaaaagcacaaggcatgttttctcttcagcatgatgatctctaatactctcatccttcttctttcttcttaagtaatccaccattcttcacatatttcggctcaatggggacacgattcaaaggtgacactaaagatccagcggtcaatgtcactacatgggttctcttagtcataatcatttttagtgtctctgctcgacttggaactaaagttcgactgttcaagagactcagcacggatgacctcttgatcattgcatctctgattgtcggtatcggtcagaatatcgctgtttcactggcagttgggtccggttatggaaagcattccaaagatgtctccagcgccaatatgcaacaggtgatgaaagtacgtatcttccgccaccttgtgatttttcacttctttggaacagattttaatgtgcttgttgccaggatcttttcgctgtctctcttctgtacctcctaagcctcatgttctcgaaactatctctggtcgtgtttatccggagtcttacaccatccgccaaagataaatggctcgcccgaggtgtggaggctatcgtgtatgtctgggcagttgttgctatctttggaactgcattccaatgctctctgccccgcgcctgggacttccagaacggccaatgcattaacctggtaggtagtgtctccttttgtccctattacctcctatcccccgaagccggacaatactaacgcgaaacgacgggtgtccagttaacttggcgctacttcgtcgctatctccaatatcgttaccgacctcttgattgtcgctcaggcaatgatcctaatttctagcgtccaaacgacgctgttgcgacgcctggcttttgcgggtatcttcctgcctcgacttctgtgagcgacccggctctacggagtgctctctcttgaactcgaaactcatctccctccgtcgatagtgtaacgatcgcaacggtcggcgagcttgcctttatcaaaaaaggcactgaatccaacgacccaacgtttcagatgtgtgaaatcactattttcgaagtggccattcagtgtctcagcatcgtgacggcctgttggggacaactgagcccgttcctgtcctggatgcgatctaacgggctcaagctcaatggtgtggaagacccaacctcgtggagctataagatacgctcacaatcccaggggcggtccaagtcgcgagaccgtaagatcaggtctgaaagccacgaacttccccctttgctgatacgacgagatcagattttggtcacacaggattgggagctcgacagccagtcaagtcaggcgcatatagtaactgagttcgacacacaatcctaggctagcaacggtggcaagtgccaagcggttccctaatcaacttagctaatgactataaattcatcatgggcgcgacatgcatagactttggtaatccccaaatcacatggaaattacgtgctggaattaaatcggaaaataatcagaataatgagcacatgccgcgtaatgatggctcccgttatagagacgcgcatactatatgtagtgtgctttttcaccttccaaacgaaccttagggacggatctggttccattcgcaatcgcgatcgagccatcgtatgatgggagatggggctgtcgcgggccaacgcataaaattctatactaccggacccaacgcacggcccgaaaccccgattggggtgttggggccgcaccctgtagaacagtacttttgtgtaggatgcttaaacctcaaaggggttagtggagaaagcgcagggcggagtgctggccaacgcagtagctaggtttctctttcgttcaggcgtgcaggaaacccttgcaactagctgtcttatcggctcgcacctcttccctccccgctcctcgaaccccttgaaacgtatctcaacgtcccgacgaccattatgcgggttttattgtcacttgggggccatattcctttctttgtcaattgtattaaacaggtctactgtcacgatctgcatgatttacctatcatatcacgtaatgctaattagagctggtttgataactattttttttttgctagtttagtagttttagcgagaggttggttgatatatctaccctccgaagtagattcttacgtcttgctcttttcttccccatcacggaatatattattttgaactaagttactctttacaaacttggctcggcacacctaccctagtgcaaacgttttagtcaccgccctttcgctagacatttgaacacatatccagccggatttcaatatggggtcggcaaccaatcctctcgtgctagaactagcgacaccagaagatgtccctgccatcactgagctatggtttgctgcctttacgcagccagtgattgggaaacttttccccaacactcccggtatgcaccaatggcaccgggattggcacttgggggacattcagaagtcccactacagatacctccgagtagtggacacccagtcaagagatgaaaaaggccgaccgcggctagttgcctttgccaaatgggacctagccatgccaaatgagcgaggtcgtcgctttccgcattggcatgaggactcgccttaccaggaatgcgaggatttcattgcagaactggagcaggcgagggagaacgtcatgggcgatgagaaacattactgtatgaatgatatccctttaaggttcacaaaggaagaaatgatcactgacatccgaaaccgaaaaagacctcgatacccttggcactcatcctgattatcaacggcgcggagctggctctatgcttgtcaagtggggctgcgacctggcagataaggatggcgttatggcatacgtggatgccagcaaggagggagcatttctataccagaaacataactttgtggatttcagtccgcctggttcggaagtggcttcgatggctcgccgccatcaggtggttccgagcgatcacacttgacttacgaactctgagtccatgctgcgagatatctcattgaagataaagccataaacacatttgaactcactggttcggattgtagctcatttattgttatgtttctgtctagcaagtatatatatattttatgcctttccccgccttttttgctgtctacctagcaagaacaagataccttaacagaagggctactcacacactatttttcgctagtaacacacatccactagctctcaaccagcttgtgtaaattactgtggtatcctgcctatcacatgacttacgaccgtactatgaaacaggatcaggtgatattacttcacgtgatttcaagttgtggagccgcaaaccttaaatgagcgcatccatgggtgagtcccaagtcccggatagagctgagatcgaaacatttggtataactccggggcttgatgacagcgttatatttgatcacccaatcgtctattatggcagaccatcatctcttgttgaaacctttacataattaggagagaatgttgatatttttgttccaaatataaaatatttctgaagcgtcattttcacttgatttctattctactctgcgctaaactatatgttgaagcggtaaatccacaatgcgtagtctgacaaagcagacaagacaaataataccagccttccaagtaggtcagctggcaagtataggagaccatgggacctgcatttctcaaaacattattctcgttcagtttgtgggtgatgatacttctatgagtgtggtaaaactggaaatacggtcttaaaaacagggcaactacatcatcatcccgattttcttactacaatgtatacaatgttttaggtatctcatactcattacgtgctacgaaagaggttagagccagattgaggtaaaaataggcttttgtactcgtttcaaccctgctttctataaatataagaaaagcccgcatattattgataaaaagaagaatcgtgtcccaatctatagcaagagctgttagcacttccagacaagcccattgcatcaacaaaagaaaaatgcagcaaatataaggaatctctaatatctgtgtatattttcggtaaatggtagatctagattttagtacacgcagagaatctgacctatatcgggttagagtcttgaacctcaggttggagaaaagttattaccgattgaccatatagaagaggaatttcacccgggtgtgacgtgctagatgtgagagtgtatcgattcaaaataaggaataggtagggagaaatagagatagagcaggtgcagaagttggagaaggcctgcttgtatagctggccacttctgtaaacatgtaagcattgaagagaaaaccctggagcggggacaggggcaccgacagccttgcctgcgaaacaggtgcgagagaaaagccgtcactgggagtactagggtgctagagaggagattcaggagaataccatggggtgactactgagaggagaagtgaaaagttgtctgcattgctatctatgcctcgggagtgcttttatagttagttaatgcagtagttagttgggttaagaaacagatggacgaggcaaattaatcccaaatatatgttatattactgagcgaagcgaggaaacctgttattatatatgtctcatcaactagtaaacaagcacatacgaccatagggtgtggaaaacagggcttcccgtccgctcagccgtacttaagcnnnnnnnnnnnnnnnnnnnnnnnnnnnnnnnnnnnnnnnnnnnnnnnnnnnnnnnnnnnnnnnnnnnnnnnnnnnnnnnnnnnnnnnnnnnnnnnnnnnnnnnnnnnnnnnnnnnnnnnnnnnnnnnnnnnnnnnnnnnnnnnnnnnnnnnnnnnnnnnnnnnnnnnnnnnnnnnnnnnnnnnnnnnnnnnnnnnnnnnnnnnnnnnnnnnnnnnnnncgccggtgagttagtagttgggtgggtgaccaccagcgaatcctcactgttgtatgttttttgttcacgcattcttttctattcgttcagaagctccctctttttctgatgttagatatccgcaggtcggagagcatgggaaaatatgtgacaccaggatgagtcgttcacctggtggacctcaatttcaaggacggtcttccgtcatctcccaaactaagttgatttctactagatacgtctctatcctcttcacccaacatggatataacctggtctcaactgggacacagcttccacggtcaacaagaactcaagatgcaagctacggaaaagccgactcaatcaggaattgacttgaccctacctgaagagaaaactcaagatgcagggggtgctgtggccgcagctgcgaatgttgcgttaatcgcaagattgataagacacggcagcttggaactggactttctacggtggtatgtggatgttgtcaccaagctcggggttttgagcttactaaaaaagaaaagatgggattccttacaaattttcatgtcgtggacgacggcagtggctaccgccgaaggatcaatcgagcttcaatatggggattatctcttgatggtcatgacagtccttttgatgtgattgtgatgcctccaggatgcgagaaggttgttccaaagagcagctgataaaaggcaaggctgaacaagtcgatgaaacgtttattcttattggcgaagaggagaaggagaaacttggcgaggtgcctgcctggtctccatgatttctttgcaaactctttcttttgtctgtgaatgctcttgctttggtggtcacgggccgatcacatgccgttacctggtttgtcaggcttcacctagctatttagctaattaactagttctcgatcattgtaaagaatctatccttcttcatctctctctcgccgctacaagagctctgatctaaactggcagttacccccgaggtttaacctctgtatgttttcttcctattcaggaacagtcgttcctgctattctagttcacggctcacgtgcaccttgctacctgtcagagcacttttagattctgtaagcttccccatcagcatcactcgatagattcataaaaaaagagccatctgagatcgtaagtctccctcgcagtctttccagcagtctttccagcagtctttccaccagtccttttgaggggttcgttttgctaacgtctatctaagatgtcttttgcctctactgcccctgtcactgagccctgcgcgtcctccactatccttgcccttcaagaggcaataaccgaagtcctgttggccctttccccacacgaaaccatatggtttttatggcagatgctcggcctatatatatgtctgttgtttgcatggagggttgatcaacttcttgagaatatgattgaccagtatgtctcattttttatggagctctgtgaagtcggatacttacagaatttacagttatatagaatttacagttattgtccacctcggaacgctgtagcacgccgagcactgtgatgtagagttctagagagcaggcagtgtagacggatcatcacccctgaaatgagaaatgagttgcgagatacttctgcactaggagattgtatactatggtgtggtctatgtgatacctatgcttgctagccggccgtcctggatggttggtgttgttgtgtcgctctcgtcttgccctgcttggtcaggctgcccatcgtgcatatccctcttcgttataaagattgatttcttattgaaatttggtagaaaggcaagaactccttgtatttttttaaacccattttattcggattcatcaatccgatagactagcttagaggctcggactttaccttcccgtaatatctgaataccagccaacgcaccggccaagctgcctgacttaatctgatatggatggggttgaatgcggcggccctcgagtaggttctgcgctgtatcccaccatttgatgccgaattcaaggttagcactatcaggggatatctcggtcgttcccatgcgataggcttcccccaggatgtcgtacgccattgagacatgcgagtcaacgtcttctctcgcggatgaaacatctagcagggcgttataggaaccgcccgccgacgaaatggcagcgctgcagatggcagcagattggggcgtcgagattgtatcaaaaacgaattccagggcatcatcagtatcctctcggatctgctctcccaccagtggatcgtggtaatcaaaaactgcgtctgccccaagctcaaacatgaagctgcgattggcttcagagcatgttgtgacaactcgcagtcccgatagttttgccaattggatcgcgagtgtaccggtagcagttgcccctccatagattaggatatttgtgtcgtctgactcgctcgactgattcccggggaaaggcaattccatgctctgataaagattttgaccaacagttgtcaaacccacaccaaaggtagctgctgcctcaaagctcatggactcaggtatcaacatttggagatcgcccttcgcaataatatactgagcaaatgcgccgccattgtggcgaacggcattgctaccgtgtacaaagccagcaactcgatcgccctttttgaaaggctttttgacgagcggccccacggcttctactattccggaatagtcacagcccaccgtggccccggtacagggtacaaaatcaatatgacgccagtccgttggattcaaagcgacttcgtacttgttagttcaactattcatcaagcacgggagcgaagaagggcacaaggagaaaataccggcttttgttttgacgagaatgtaattatccggcagcctagggagtgggacatctaccagcgttgcgcgaccaggttcttggacgacaatggcgctttgggtggtcattctcaacagatgtcgcgatgcgagggaaaatgaggggtgcgagagaggtgggggtatggctctaatttctttagataaattgaccaaatggcattgggggttgcaaaaggggtgtatactattgcactccgtgcgcaattctccgtacgcggcctggaattactccgtagagttgtccatgattccgggcgagattgaactattggagatctcagacaaagtacggtttgccgcgcgataatctatctggctactgcgtgtagcttccaggatcgtcgaaatacggagtattgtaagtgatctgcgtggaggggaggggcaagcaagtgttagtagcttcaataaagtcaattaatccattactattgtcgaatgtgctccgcagcctagaagatctcatcgtgatattgagaccgggtagcgcgggcgatgccagtaaatggtccctcagttaccacagcccaaacatcaccgacgcgagattagactcaatgataatagcccaatggatagccctcgatatagtgcaacaggcaatattgagattctccaaaatacatccatgtcctccgtacggagtgcggagcaagggaatcgcaagtacccggggagtccgaaaagtggaacttgtcgcaaatagggggctgggaaaagaaagtcgttgctccactacgggatgggaatcccctcatgagaaaaatcataagaagaaattctgataggcgatcttcggctacaaacattggcttggtgcagcttagcacagcttagtgtcataatatagtggagcatggaacatttggcaatcgtgaaatacaatgaccgatactggtaatggcttgtcacagtataatttataacgtatgtctggtctatcttaagggatggacgatccagttcgttgatctatggagtagacaatctccacttggcagcattttcgtaatcttggcctcattggcatccgagcagattccaacctgcagaatatcatggaactgggtatagaatcagagctgaacaagcatggagaataagatcccacagcattagccatatctattgttccggacttgtttctagcgtaggaaacataatcttaccaagccaaactccaacggatgtgcagaatacggagtagattgaatgcacgaggtgcatcgtccgtttttctatgagtctccactgcatgttctccgatagccagtaaaatatgcatgaatatacaaatttacgcattaatggcattagcgccgagagccagtttcatggcaatcagaagaatgcaaaacattgagtataataacccacagcatcccttcttattcttgtccacgctcgtcctcgattaattttataccccgaagatgcctagtctaccagcaacgacttctgtacctacagatatggagggaattgcagtcattggaatggggtgtcgcttctctggaggagcgacctccgttgagaacttctggcagatgctatgcgacggacgtactgggcatgggacagttcccacaagccgataccaagcttcggcctggcatcaccctagccatgaacgcaaaggagcggtatgaatacctcaattagatgttagtttactattctaacaggatgaatagatcaatcatgatagtgggtttttcttgcaggaagatccatcacggtttgacgctccttttttctctatcactgccaaagaggcggcgggcatggacccagcacaacgtttgttgctcgaagttgcatacgaaacattcgaaaacagtaagttgagtgattttcacgtttccggaaagaagtcagctaatagggaaaaataggcgggataccgatagacacgcttccaggcagtaacacggcagtgtactctggttcaatgaccaatgactatgagctattgtcaacaagagatatctatgatatgcctcacaactcggctactggtaatggaaggactatgctggcaaatcggttgtcatggttctttgatcttcaaggcccaagtatcatgatggatactgcgtgttcttcaagtttgactgcgatccacctagcagctcaatccttgcggtctggagagtgcggaatggtgagcactgcaatctgatgtctattgatcacacagactaaacatgcttgtgacaggccttggtgactggtgccagtcttatcttgcaccctaattttacacaaagactgtcctacatgcacatgatgagtgcagatggcataagtcattcatttgatgagtctgcaaatggatatggtcggggtgagggcatcggtgctgtgcttttgaagcccctcagcgccgcattagccgatggagataatattcgagccgtcatccgcggcacaggaattaatcaggatggccggactcctgggattacactgcccagtccaacgtcccaagccaacttgattcgttcggtttatgaacgtcatggcatctcaatgagagacacttcctactttgaagcacatggcactggaactcctgtcggggtaagcaaaatagctccattgatggataaaaagccatcgtttgattaactcaatgatgaataggatcccatagagctgtctgctgtcggaatgactttgggccaggcacgaacaccgactgatgagccaatatacgtaggctcagtgaagacaaatttcggtcacaccgaaggagccgcaggagtggctagcttgatcaaagtcgtgctgtgtttagaaaagggcacattggtgccaaacgccgggttccaaaacatcaatcccaagatccggctcgatgattggcgtttacgcctaagcgacaaaacaatgccctggccagaccatcttccgcagcgggctagtatcaactcatttggattcggtggatcaaatgcgcatttgattctcgaaagtgccaaagaagccctgggcaatgctaaagaccaggagccggcccctcatgtggtggtgttttctacatttgaccaagctggtatcgaacggaccggtcaaaattggagcacatttcttcaacgtcaacaaaaagccgagcgggaggcttcactcaaagatttagcccatacgatgttgacacgccgatcgcagttaggcttccgtagcttcgcagttgctaactcacaagaccagctgcagagcatcttggataaaggattgcccaaatttccccgagctagtcgcaaagctcaaacaagacttgcttttgtgttcacgggtcagggtggccaatgggctggaatgggccgggagcttttgaggattcccactttcagggaaagtatagcacgatcacaggaaattctttcgtccctgggatgtccctttgatatggtggaggagataaaggcggaggcaaaagacagtcagataaaccgacctgatcgcagccagcctatcacctgcgcattgcagattgctttggttgatcttctggccagttggtcggtttttcccaacgcagtggttggccactccagcggtgaaattggtatgcaaatctccgttattctcgcttcaaacaagcatccaatgatgaataaaagctgacttatttgcaacacgtagctgctggatatgccgctgggtatctttctcgtgaagacgctatgcgagtcgcatggttccgcggtttcttttcgcagcagattgcccagagtgacagacgaggtggtatgctcgctactggtatttctgcggctgacgcaaagaagtacctcgaggagctgcctgcacgttcagttgtggttgcctgtgtcaatagtcctgccagtacaaccctctcgggtgatgtggaattcattgatcagcttgaagcaagattacaacaggatggtcactttgcccggaagctgcgcattgatacagcttatcattcccctcacatggaagatctagttaaagtggtaggtagtgctatcgattgtatcaagcctgaggatcgatacaatggctcaattcccatgctttcatcggtcacaaaagagcgtgtctatcccgccgaacttggtggatcatactgggtacgcaacatggtcagctcggttgagtttactgccgcagtgtcacaactcgcaaacctgagcgagtctatcaagtctcgccgacggccggttccaataaaatggaccgctttgattgaaatcggtccacacgccgttttaaaaggacctgtcactcaaatcctgcagtctgtcaacgcaaatatggcatcattgccgtactattcgttggtttcacggaaccagcatgctttgcgaacagcattggaagttgctggctcgctttggagcacaggacacacaatagaccttgctgcggtcaacagcagtgtcgataatacaagcccaaaaatgattccagatttgccttcttatccttggaatcaccaaacgtccttctggcacgagccattagagacagcgcagttgagacaacgtcagcatccacgtcatgatattctgggagctgccgtagattttcaaaacgctttagagccaagatggagaaacttcctgcgactctccgagaatccatggatggccgatcatgttgtcgccggatcgattgtgttcccagccgcgggaatgttggtgatggctactgaggcggcgcggcaactagctgatagcccagccaacatcaaaggaatagaattccaagaccttcattttatgcgaggggttgttatcccagacgaggaacgcggcttggaaactcttcttcaggtctcccctcatccagggatgccgggttggtatcagttcggaattttctcacttccctcggggggtgcttggattcaacacgcgaagggtgcattcattgcgcgattcgagaaccgaaccgacgatgagcataattcaaactggcaagcagcgttggaacgcatcaagaatacccaaacagtcgccaaaatggctgacgttggacaagcacgtgaatggttgtctaacacaggaggactcaccgtaggaccggccttccagacagtcactggcgtttctttttgcgattcagagtctcgtctctggctatccggggtcgtcacagacacaaaacaatcaatgcctttcgaaaaggagtcatccagttttatccatcccacaactcttgattgcctcttccagtctgccctgttgtcctgctctgatgcattatccagcaacaaagcaaatattccgatcggagtggacaatatctacatatccaatacgttccaaccccaaccgggggagcagtttgtcgtccacacagagaccaagtggcgagacgggaaatcacaatcccactgtatcgcgtcggaccccacctggtcacaaccctggatcacgtttgaaggtgttcatctcggtcgccttcccttcaactcaaattctctaaagcaagaggaagcatcttcggagagccgatattcgtcgattgtttgggatgaacacttggagtcgccgcttgtcactagccaaatcaatgacggaaacaagaagaaggccgtgcaagccagcagtctccaactaacagactggatcaagagattgtgctataccaacggggatgccagagcactcattactacttcggacacatcctcttggatcgcaagtctacaagagctgattccaagtgccggcaagcggccgtgcctaggaaggatgacagtcgcttcatgtggccacgaaaatcaagtggagggcgtcactcccacagagaacagcctcccgggaactcacctggcatccctcactacattaagcgaacttccatcttcgtcgctcgctcaggataaatatgatttggtcgtgatcgatgagcccaagtgggacgacaaaatcattcaagttatcctatcgtgtctgcccaccattcttgaacacggaggtttagcagcaatacgggtatcaggaaccaatcgagactcggcagcagagaagttgcaacgattggaaggccttgaaattcacagcacgaccaaagatcgcgagtttatcatcgcgcgcagaacaccagtctcgtggactacagactccgaaatctatattttgagtccagccgacaaatctaacacactagctgttttcgagcaccttgggaatatatttgccacccataacgttcgtctggtgcctgttgaattggaacaggtgggtacactagcaggaaagactgtgatttctttgcttgacttggcaagtccctggatatccggctggacggaaaatgatttggaacgtctccaggagttgatccgagttaaatacgttctttgggtgtccccttcctggagccaaggggctgttgagaatattggatctggtgccacaggcggccttttgcgaacacttcgcaatgagcagtggaacaccaccatcccacacctattggtcgatgtggaagatttggaagacaagttcggactagcttgtggcattctccaagtcatgcagctcacgacgcaggagagctcgcgccggccagacttggagtatcgtctggcaaacggtcggctgctagttccacgggtcattgagactccaacagtggatgaggccatgcacactcttatgaatggccccaggcctgtgatgtcagaccttacacttgatccgagacgccttgagttgaagttccaagatgcagacaacgcacgctgggaggaacaacaaccattcgaagagggacttcgcactgaccacattgaaatcatggttgaaatggccacaatcttcgatttacatggggatcaagggaagacaccagagacagctcttccaatgttcgaaattgttggaaaggtaactcttatcggatctggtgtgcacgacttggctgttggcgataaagtgttaaccctaacatcggcgagctcgggactcatgacagcaatgcgggtcttagaaagtgacactatcaggattcctgcaaatatggacccaaaaaatgcgatatcaactcctctagcgtacataaacgcttatcagattctcacccaagttggtcgcctcagttcaagttcctcggtgcttttggtcggctcaatcagtcaaactctccaggccatgatagattatgcccttgccatgaacatgcaagtcatcgtggcaactgattctgcagataccaccgagaaccttcgttctcgctacccagtattagcggatcgaattctcggcgttcacggtagcctagaaacaagtgtgtctaggctaaccaacggatgtggagttgacgccagcatttgcttccttggcggctatgcgggtcggaatgctgctaggtgtcttgtcccaggtggacagtacattaatctatctagcgagatgaagatgagtgctcttccagagagcttcattgacagtggctgcacattctcttcgccgcgactgcagaaaattttctcggagaaacccggcaatcttcatgcttcagtacggcatgtggttgacttcatgaagcagcataggatgttggaccgcgtggagtcctattctatgttccccgtttctgatctccaaggagctttgaaacattgcaaagtggccaatacccgagctatcgtggatcttcgggctcctggaagggtccctattgttctgccactgccaaatcttactggcttgccagcggaaggcacatatatactagcaggtggattaggaaacctcggccttgcgcttgccgataccttggtgcagtccggggcccgccatttggttttccttggaagatctggcggggcacaacctggtcaacagctagcccttgatctccttcgctctcatgggtgccgcatagatgtactgcgctgtgatatcgcccaacaggcagatattgaccacctgtcatacaagattcggagtaagaactggaccgttgcaggcgtgattcagtgtacaacagttctgaaggttatttaccctcatttcgttcgttttcattgacactagctaattccttcgtttattatcaggacgcaatgttcgagaacatgacttttgatgattggacccaatccacacagtccaagatccgcgggacactgaacttgcaccatctattttcggaatttgaaggcttgggtttcttcattgctttgtcttccgtggccagtgtcattggtaatatgggacaggctaactattctgcgggcaatggtttcattgacgctctcatggaatggcgacgcagtcacggtctcccaggtcattctatcaatattggcctcgttccagatgctagtggactcagcgacattgccgaagatcaagagcaacgccgccgccgatacaaacatcttgagggtacagaaatcatgacccatgagctccagaccttgctcagagtgatcattaacagcaagctttctcttccatctcaaataattgctggcatgaccgatcatctgtctcgcagcaatggctccatagcctgggttctcgatcgaaagtttgatcaccggctttgccttgctgccgatgacactgaggactctattcagactagcgccttactcaaggggtgtgactcccttgacaatgcaactgaggttgtccttaacgctctgagtgaatatctagcagatgcaatggctacaactgccgatgctatcgactcagatctaccattgtccgcgttgggaggtatgtcttttgatgatttttccccactgtgacttttgtcttgactaacactggcttctaactagttgattccctgaaagctacagccgttcaaaactgggtctctcgcgaactggggtcagaactatcctccttcgagtttcttggctcacaaccgaccaaggcgttagcgaggaaaattgcttctactagttcgtttgtctcggtgccgagctgaaggactatctgataatccatactcggtatggattagctcagaacaaccttttcttcacccatcatgtttcctgtttcaatctcggtttatcaaatctcatttttgggtagtttcaatagttcagtatatgtgttttttacttacaatacgtcgtttcgcgtacgaaatatacgaaatatatgaaattttccaatttgccaagacctgtagcccgtgccgcaggtgggtcccgtcaacaaactcacatgtcattcaatttatcttcatccttagagcagcctcgcatattttctggcggatagctccgctgtgcagattgcaggaccaatgcagcatgtaatggccggggtgagagtcgccattgcaatatagtgagggggatcaagcacgataaacagcttcatccacgagtggctccactgaagcccatagccttgacacatcgggaactggatcgacacttcgatctggatgatctggttgatcaacaaaaagaccgagttttcgatcccgtggagcgggctggggtgaaaatttctgctgtgcaatctcgcgaagacccctgccctgaacgatgacaaggaacgtggactccgttcggagtacggagtacccgcggacacgttaccctgttaagaaacggttgagctgtgcggtcttccttgctgctgcatggatggtataatatgtgcatgtcacttgggaagtaaggcgataaccccacttgcctatggagtgagtaactgtgtagcttttacaagttccaccgtccattccgattttttaagagttgatttcgctttcgatggtctcgcagatctcaaatctaggttctatgctagctcaagagaaaaacccacctcgattatgtatatacactatggttgtccggacggtatcgggatctaccaagccggcaggtcggcgtctgtccagttacatcggccgagatactccgaattcaatcaaaattcaacacgaccctaaatggaaaggcttcgaagcaactacattgaggggtagtttgtggagcttgggctggaccgtccacgttcccaccgagtctaagcaaggcaagccactatcgatatgctactccgtactttgtactccatacaacatagggcatctccacaccgtggagcctttcatggacccaagcaggtccatcaatatgtactctgcaaggccggaactgtatggagtgggattgcgcgggtgactttcctaggaaggtcggactaaaatttgtaaggcgtcttctagtcttgcacatgaaaaaaaggaataaatggaataaacactctgttgtcgtcttacaatctctctccccccttcctctctctttcatatccccatcctttcatcttcagctatgacggacgctgagaagaacgatctatgcatgccggtacccccggccaaggctattgtcatagatcatgacatggccattaccccagatcctgaaaagtttattggcaattactcttccaatgaggttccatccaatggccccgattctcccaatgtggttgacctggaggctcagcccacagagccccgacgaaagcggtttgcgcacttcagatatgtcatgtttactgtgtatcgccggctcttcactgtggtattttgcgcaaatctcgctgtatttctctacgtgatgatctctgatcggaagcttttggcacttgtgaatgcaacagctgtcaatttggtggcgtgcggtctcgctcgacacccgatgatggtcaacgccatctatagagtggtgtgctcgattcctcgaaaggcacctctatctttgcgccgcagatgcgctaaggcagctcactacggtggtgttcacagtggctgtgggactgcatctctggtgtggtacattggatttgttgccatggtgtcacagatctattggacaaattctcccatcagcacagtaacagatgccagtttctcggccgcaccgatcgccgtcgcctacgtcattcttgccctacttgttgtgatggtagtcgtggcatacccaaccttccgcaggagaatgcatgattacttcgagctcacccaccgattcacctcatggctgatcctggcccttttcgtggccttagtcatgttattcgcccatgacgtgggcaatgcagagcagcaaactcttggctataccctcgtcactcttcctgcattttggctgttaattgcggctgtcttcgccgtggcccatccatggctattattacggagggttccggtaaaggccgagcccctgtcttcgcatgctgtacgactatcttttgacttcaccccgatcaacttcgcaaaaggtgtccaagtctcaaagcatcctctacgcgactggcacagttttgccggatttccagaccccattccaaccggtgaaaagccatttgttaagggccacaggcataagagaagctggtcgatcgtggtgtcaaaagcaggtgattggacggcggataccattcgtgaaccgccaactcatctctggaaacgcggggcactgatgcgtggtgtcggatatggtctgcgtgtcttcgaccgcattatcatagtcaccacggggtccgggataggaccttgccttgggttcctaggcgacgaaaaccggcccttgatcaaggtcatttggcagacacgtaacccggtcaagacttatggccaggatgtcattgatctcgtccataagatgggccctgacccgattatcttcgataccagtcgtgatggccgtgttgacatgctccctatcgtgcgacagcaagtgaaggaattcaaagcggaggcagtgtttgttatcagcaaccccaaaatgactcaagatatcgtttacgagtttgaatcacaagggattccagcctacgggccaattttcgattcatgattcacgaaacacaatatatgttgccttttgattttattctaacccagttatgatatacgtttatgacctacatttcggtatttttcgagctatgagcctttcatccatttgtttatacgagtcaagtctagcaataaaagtatttcatataattatcaaaccctaaggaatctcatgtgatgccatgtcatcacatatttacatgtgcacagggacggagcgcctgattttgcagggtcggtgcgtgaatacgcctgagctctgctttatcttagactgacagaaatcaaaatacctgaattaccatgacaaggtcagttcaaacaatgaagctattcccgccatacaaatttccttatgtacccatttctcggcgttgaagctattcctaccgtgcaaatttccgtatacaacttctcggcgttgaagttattgtataaacttccatatacacccgttttatacggttggggtcggttattaacgcccagcaaatgatttgtatggattgtatggtctgtttacagtacatggtatagagcggtgtcgaaagcgacgaataattcaggcataagacctggaaaatcaggcattagacctttggccgctaactaactatgccccttcgcatacactatcccagtggcaacggatacagacttcactcctagtcctatccaaagcggcattgccactgcttgtcaggactatatatttcaggtgagatacgcccacaaccatggcgtgagccttccgctaacaaatcacagactgatacatgcgacagcattgtgtctgcagaaggctttttgacggaccatcaattcgttaaatggaatcccgtctttgggacgtattgttccggtctcgatagaatgggtcatagtataaattcaaagtagcataggtcgttttgccgatgaagggtctaagccttcgcactttctactcagtaatctgtcttaagatttaggcacaacaaatcaagtcaattcatctctttaaccctagaagcaggtagctctcctatcatatctcttatttcttccctacaaaccaaacgcaaggcatacaggatacaatgattggtcaccccacatagtatctgtaagctcccacctatcttgaccaggctttatttgtttgattctttggaaatagtaatccggaacgcaaagctgcagtcttgtccactctcgaccctttgatagtctgtcaaacggcttaaggaacgtcctcagcctctcgtcgtcaaagaagatctcgccaatttcgctcggtggcattttaagttgtaggcgtagtcgatgtacaccacggaaactctgctcgaacaatccgaagaacgcggcatatgttctcatccaatcatcctcgtctggcccagctttgcatatattaacagcaaacgagatttccatagacgtcataaaagaggcacatcgcggtgccaaaatccttgatatgagaaaaggagtatccatagcattgtccatcacaaagttatttgtcccatagagaacatctaaagcttcttcgtatctgcacgatgataagccattgtcctgatattatgagcatagtgacttacccgatttggcagcatctcaaccactccccgccaattgtcagcctttgcgactcagggtaccaatgtgaacaagggtcatcacaagggtcgttgatgaagtcatcacattccatacagacacgatgccaccagtgccagcgaggtcctcctcgtttcgactgcggccaagatggcaacggctccatccagaaatatcggatgtgcactcgccgaccacccataagctcaatgtataccaacctccttatctcagccggtagacgaaagaaggaacactgctgttgagagctgcgctttcgagcaccaagcttacataagccttgttctggctggatcggcagtttccatcgattgaatatatcgccattgatctcacaggtggaatctgagattcctattgcgtttggggaacaatctctcaatttgaacttggactcttttttcctgcgtttgaaaaatttggtaaaaagttttggtgccatgagggtggagggtggagtctaggagcgtaggagagtcggggtgttgattttatatgtgcttgggtgtgggtgaatgtcaccagtgcgtggtaaaacagaagtactaccgcaaaataggaggggaattaacccacaaagggttgggaccggtgtttttacctcacaaagaatcaaagatccttgcaagcggggaaccgccattccataggccgggatcttcatcttgctctttctcctttagttcacaggcttcctcttctagtcctgatttccaatggcaacgagatagccctcaattgtgacaataagattattgtcggaggcatgtttgggaccagtctgataaccagctcgattttgatggtgtcaaattgcctaaacattatggaaatgccaaacatcgagaccagagtgatactgagacgaaagaaacgaaaacgggcggcggcctcgactcgtcatcgtggaagagctcgtgttcgttttgaagaacaacatgaatacacaaagtgatgaattaggatcggacagaaagaggaccaatgctagatcaaagagatccccaggaagctcaaagaaaagccaatcgaaagatgaaacgacccgtaacctggaagagaaattgcaatggcttaagatgaacatttgctagtagcgctaccgcacctcaggcagaggggcatgttgacatgctactgatcttgagtccggtagggattaggaatactgaacgctgttagtagattggtttggatatacttctcggtgatgctgtactagcatgccatttgtatcacgaacatgtagttcggagaaaccgttgacgagtttcgtgcgacggacaagtttctaccttgtcatcataatagcccgaattgcgctatttccgacggctaagaaaaggttcatattatcaagtgattcctggattcgctctaaccccacccactcacagaagatagaagaagatcatgatctaagcacaggaaaatatcagtgtcttttcgcgagaagaatgataatcgtgccaggcgctaatcgaaactcaagggctataagaattcagtacatatttcgaatgagaggagcgtatgatatcttatttattcccactcgtacgtcaaattagacttcatcctaggtagtatccgagataactggggggaaagacatcactccactcgtcttcacatcttgtaatctaagacccctaaatcttcctcctttttgagggcattttccatcttcgcatttgttcgcccacgcgcttgtcctgattctctgctgtcgtccttgtggtcgttctctttctcctatttcttctttccctctggctcgtttcccgcaattttgttcagaaggagctgacaattttggacgaataggtggtgatgcaatggtgaagatgacagtaatgcaccagcgccacttcggtcgttgcaatgttgtaccctgtcaccctccatcaatccccgatcattttttatagttatttcgcgcttgagtttgacgtaagctaggggaacactagttagctaacttctggtcgctctgtcgcaggaatttgagtctggttcgatttgggattcgagactggcgtcatattgggtcctagccgctaggtactcaggtaatcgttgggttgaacgaggcggcgaggtcagggcgaggtcacatggtcgagtatcttatccattatcatcatgtgatcattggatgacaaatcacacatgaaagtgaattgtcgttctttgaagctacaatgttgaatcatatcatgtggtcgtacagtgtactgcatatgtccatcattgcatatttctattattgaatgtggaccattccactcatatcgcaggtacggcagtctcccaccgccagtgcgccatatcagatgttgcctgtagggtttgtttttaggcacccatgaggctagccagggcttttcccaatcaaaacaagatcattgcgtacgagatttttggcaacgaatgaagtgcttttccaggcattagcggggtacaccaggtgggaggcaaaacccgcccagtgggtgtatataaattggtagatgtgcccttttaaatgtccatgattctacaaataacatgcattcaagtcgactaagaaaacgccatgcagagaggttggagaccatccaggaccttgtcccatctctacctgcagccccattgacatccccgctatttaccgtcttccccgccgagatccgcaatcgcgtttatacgttcgcccttgagtccgaggatgttctcacagacgacagttctcactccctctacaagcaaaatgctttctactaccgacccggttataagcagcccaagcgcatccaaactgccctcctccagacatgtcagcaaatctacgctgaggcgtccctcctcccaccggctgtaaatgagcatactttctggttttatcggtctccgccgcatgtcaatgatgcgtcgtcaccgctaaattactttcgcaagatgaccccaaaacagcgggctcaggtgcagcatctgcacctgttcacccaacagtatttcctagaggacaaccattggtctcagatatgggaggggttgaagataggcgacgacgggcgcagtttgcgaggggagtgccggatcgccccgaagaagatgaccatcacctttcgccacacggactggtggtactgggagaacaatgaccccctgggcatcgatccgttccggcccggaagaacacatgcaaccgatatgggcaaggctgtttccccgcacgacgccgctcgatcatgggggaaccaattcagctctatcccctgccttgaagaattggtgatcgagttcgagaccatcatgcggaagagggaccagctagatgacatcatacaacaagctctcgagtggaaatttcccatggaggctgacaagggcttatatctggtggctgaccccaagtcgaagagcgcatatacttgggctggggcgaaagaggcggagctgaaaagacagagacctgtacgaccggtcgatgctgaggctgagtcagaatctgcccacgaacaggagccggttcctgcagctccggctttggtgccgtatgatcctcagtccgattcaggcacaaatagcgacattaatcttggaaaccatcccccatctgacacagatacggagaagttctatgtcgtcttcttgacttggaggaaacagcgtgtcctggagtgagctactcatcccaacctcagtatcacgagggatctagattttgttcctacaattctgacacagactacgatcccacgaggaatgtaaaattgacacattgttagatggttcatataaattttcatactttcgcttcatatataaggaataacatcctagtgtcgtatatagtaaagtacttctagcttgctgcacgaagtacccaacctttcaaggttagaaggtacaaatgaagaggattgttgctcgcatccccccctgcctgaattttcagtggtgccataaagcaaacatcatgtcccagcagtaataacgacgcgaatttgtatcacagtcgataaaagaaggtaataaagaaatatgtgaaaatacaaagtgtgaaaatagacgacacagctagcacctaagggtaagtaaaggtgacatacaaaatttgacgtatgtagaacacaaggggttctaatatgcgccccagagggtggtctgatgtttgcttcatcagagataatccgggggaggaactggaaggatgaacttcggaaaatcgcgaggagagaaaaggagatttgaaagaatcggagtagaaatgtttgcccgtagtcatctgatggcgcgtttagaaagccaagactggatttcaacagctttatcctaacgaaaggacgtagagtagtagggatggcgcgattattgaaggcaagaaagatgtccttatatatgaactagatagaatagatacgaaaaaatcaatttagcaaacaatcaaatcctggaatggacctgattcaccaactgcgcaacagtgtcgactatctcatccagcaaagacacagcaaagtccgaccacgactcaacagtgacaacttcgatgcacaaagtatcccccttggggaatgcttgcaccttgatttcccgcaacggctcgaaatgcgggtagatggtctgcatacgactactagccgccatgaaagacaaaccctcaacatgctcaacatcctggtgcacgaccgaatcaaaccaatcaaccgtctccggccagtcggtacagtctttgataatttccttgagaccgattccttcgaattgcgcgctctcgagatgttgacgctgtacaaaccgcaaaagatccatggcactccatccatctgcgaacttcacccgcactggcacatactgccatgatggtccaacaaccgcgtcagcgttggggaggtcaatgttgcggccactcaccacctcgccaaaagtgacatcatcaagggagagtcgtcgcgcgaggcacagcggcttgggcgctgtcggtagggttgcgactgtgatttcccgtggtcgcgcggctatattgacatccttggagatggcaaaatgagctgcagacactacagggatatcgggttggattcgtgtcatagacgatccttgaaggagatcacgccagtacggaatgctgactggcagattagtgcgagtcacgtggccgacatacgacgagaatggcagactcttcggcactggtcgtccctcgtacaatgccgatagctgctgcagcaaaattggaagacagatctcatcatactgggcatgagagatgcgcatgatcaggctgctgggcccgtcaacatgccgaacgaagagaaatttcaaaaatggtgatccgaggggaatacgtgactgaacatccacatcgcaaagtttctggctgaacgcctccacgtcactttcaatctcatattcaattatctggcagggaaggtcatctacaaccactcccaatgagacaccctcatgctccacgaacacagttcgaaggatctcattccgggagacaagttcctggcagctttggaacagttgagtgcgatccacctcggtatccatgtagaaaagttcgtatcgcatggaataacgaggcagctggacagttccctggacggcaatttcctggagcgggcgacttggataggcatccacaatcttccactcaggctgagcaagcaacggggtcatcttgttgatgaaggcatccacatcggtcagatcgagtgagctgaatggcgcgtattcccgcgatgtagcaactgatggttgagcctccacggcgtgttcggccatgtcaaagagagatcggtgatcgaagattatggttacagttagctcaaggccatccatacgagcctccgagaccagcttcatagcacgaattgagtcacctcccaaatcgaagaagctgtcatccaaaaggatatcctcacagggaatgtccaagacctggctccagacccgttggagcttttgctgcgtgaccgtcgtgatggctgcacgaccactaaggtttctgtttcggggtttgatttgaccaacttgcgcgtcctttgcgcgaataataatcacagagccgtcactggtgtatttccccagctggtttgtcgtgtacagctttgttggttgcttgaaccaggatggattggcaactgggttgccggaagccagttcatcttcgctttcaacgaggagctcacccaccccaccaggtggaacaagagactcataatcatttggattaacgatccaagttgatgtgacaagtgagtaaagatcccccgcaggaaggcttgccgggccaatcttggcgagacggcattgttctggaacatccgtctcaattgtcgaatcgtatatgtgctggattcgctgagtcggatcctcgaggatctgctgcaccagccgatcaaactgttcgagcgcttgctccatctgccggacatcaatggttttcgagtcgaagctggccatgacaaggaacccttttggatcaacggtgaagacaagcataagggcgtatgaattgaatttcaacgcttcccgggcggcctctgcctcgcttgttggaacaaatgcggtggctggttcttcttccgaagaggatacgctctcctcgaccgttgggtgaattacaatgcctgtgcgcaattcacacgcctctcgagcatcggcgttcaaacgtcgaatgtgctgcagacccatgtgttcgtgaggaatgcgatctaccgtttgatcatgaatctgctgaaggtagcttgatgctcgagccttgcgatcgatacagactcgaaccgggacagtggtgatcattgggccctcgatctcctctactgctgccacgggagctgtgcgaccggtcatagtctctccaaacacgacgtcatcggaggatgtgtaatacgcggctaaaagaccccaagcacctcgaataagggttgcaatgctcgttgtagagctcgacgaagcccgaggcagcttgacgtaatgttccaggagagaatcagcacgcgcttgatacccagtatatggaatgagagggaattgtaacgcggtagcgccctccagttgagttgcccaatatgtctctgtggaggctcgatcagtgtcattaagccatctgatgaagttcttgaacggtgctgggctgccgatactctcaccacgataggcgcgattcactcggtcaactatcaatggcattgaccacccatcataaagggcatggtgaatgctcaggacgatgtagattttgccggtcgcttcatcctccacaatggcgaaacgagcaagctcagttcccagagacatccccttgagtgtatcgctactgagatactccgccaagttggaactactgagccatggagtgttggtccgtacgacgatctgcatcaaaccccggcgtgggacttggacaatccttgttcgtaggatcgcggagtctaccgagacactctcgaaagcagactgtagtcgtgtggcggtttgaacatcctggagctcaatgaccctctgcgcgacataggcatctgtatacttcgcggagagggccatgagggcttcttggagaggtgtgcatggatacacatcagccacctcttcaggatgcaagttgcacagcgaagccacttcaacccccgcagcgtcggcttcccagtgtgctggaagtagcgaaaatgggggaacctccactggagctttgttctcaacctgtttcattttgagggctagatgctcaagaataggcgattggaaaatatcagtgacttgaatagcaagaagctgctctcgcgcagcagctaccaacttcatggctttcaatgagtcacctccgaggctgaaaaagtggtcattgaccccgatctctgcctcatcaccaaatatcttcaaccataggccgtggagcttgcgctccatctctgtccggggtgttaatttgacaactgtggacaatctaagctctgcaatatgtcgccttgttaggccattgccgagagcacgcagctgcttccggtctgtcttgagcgacactagaagtggcatgtgattgagtggtatatatgcggtggggatcatataccggggcaggtttgaggcgagaacatcgtcaataccagcgatcaacttttggaatgaacttgaaaatgagatgatctcgctgattgtgcccgtcttatcactcttttcctctgccacaaagacaatcaatgtggcatctgctttcttccccccaggaaatatcacttccgctgcgacacttgctccagcagggaagtaatttcggacgtggtgctcgatttcgcccagttccacgcgctggccgcgcagtttcacctgttgatcggcacggccgatgaaaacaacactgcctgaggcatcaggatcatatcttaccaggtcaccggtcttgtagagacgacccttgcgacctggcacatctcccccaccctcaagcaaccatgccgggtcctcgatgaaaacctcggcggttttctctggattattgaggtatccatcaccgaccacggggccttcaacaagcagctctcccacggcgccgatgggcatcaatcggtcgtggttggatggatctaccacccatgttgtgcctccgactccctgtccgatactggtgtacgatcgaccgggagggatgtcgttgttgattgtgcaaccaacagtgcactccgatggtccatatgcgatcacgaccttcgtcttctggccccattcggccgcatcgctagcagagattgactcaccaccaaggccaatgacctccagcgatggcatgatatcaggagccaagacacgtgcaaccgatggtgtcatgtgcgccatgtttacattcaatccgcgaatggcgccactgagatcgttgactcgttggtcttctgagggcacacaaatgcaacctccgttggccaaagtgcacagcatgcagtcaacactgacatcgaatgcatacgaggggaagtcgagcactcgcgagtgctctttgtatcccacagctgcggcgcgaggtactgcaccactagtgtagttggagtgcgaaatgactacacccttaggcttgccagtactaccggaggtgaactggatgtaaagggttgacgacgctgggaccacaggtaggtctaccgagagtgatttcaatttgtcttcgtcgaccagcgggccaacaataacttgctttcctcctgggacaatgcgcgatcctagttccgcctgcaactccgaggtcaagataaactcagcctcaacctcgctggcgatagtgctcagtcgtccctcgggctgactaggatccatgagaaccaatgcaccgccagccttcatcactgcgagcacaccgacaattgtccacatagacttttcaaagcagagtggaacagccttgccaatttgcagtccgagatcaactagatatctggctaggtttgttgagcgctcttctagctgtccataggtcatctctccatcccaagatacgactgcaggacgatcgatttgactttgagctttttcactgattatatcttgaatgcaatgatcgatagttgggggcattagcccgttccacttccataactgtgacagctctcgccgtccaatctgaatggccttagccacgggcttatcgaggtcactggcgatagaaataatgaggtcggcgaagatatcaggtaggacggcttcgacaggctgcgtggctgtcggggaccgcggagtcccgcgaacatacacaacaccatccgagagctttgcttccagggcaaatgtccactaatcaagttaataaccgatcacagctataattttagatctacttactttactctcaagggaggcatttcgacataagagtgtatccgaaaattctccgtcgaatttgccccgcctccgaattgcatccaaggcggttctcagcgagctgtcttccccctcaatcacatcggagatgagacctccttggagactgccctcgcttacccaagaaaagcctccatcttcactgctcactgttccccgaaagagaaggaggatccaagccagcgcgaaaagttcctcgtgtcttatatccggcagcattggtagggccatacagtcggaccagccaacatcctgtggcttcaattctttgctgacccaaggggtcgcactgggctcgatgtattcacccatattcttggaaaatagcaatatcaagaaagtgtctctagggcttctccggggactacgaagcaacgatctgattaaattatctgatgctgatcttcagtaacggacttggcatcctgcgagaaaccccgtgcctgcagaacagggccacaacgggtagaaacaatccgagcaggtgccgaacggtcattgccaatattgcaatggagcccgttagagtggggatacatatgtatctgagcccatgtatggttataacgcaaattactctccatactatactataccataccataccatacactaacgccaagggtccacgctaagcactgccaccctggacccaccttggcactaaaaaccttactgcagagccatggcagtcataattcgaaactttcgatattttctttggtggaagattgtcatcaatatgacgatcatcctcttcaatcttaccattgtcgcaagtttccgcctcgatcaattacgttgattgcgacatcggatatccgtcgattcatcacattggtgatttctgaaccagctttggaaattctcgttttaaccatgtatgggaggctagatcgacttccccctgttgttactagtctgcgccaagtagcaatactgagatacacggatggtcctttgtagcagccaaggtctctggtggacatagacaaggatgatcaattccctacatcgcatgaagaaattccccgagccggaataaaccgaggatgaggtggtcaatgccgacattgtatatctgattacttattccctcgtgcatctcctctgagttagtagcattgtcacgtcatgtctttgagttctctccccctggtgcggctaccggagccatacaagacaacctatgaattgcatgtcgtatccaccgagaaaaacctccgcaagtttcagctactgagatctcctcgcggggatgaaggcataccacccccaaagccattggaccatgcgtcgttgagattcacagatctgtcccagcccgattcttctttcacaccagacgaaggaaacaactcaccctgggctcgcgcacagagaagtccagttacctatatctcatgggaaagctcggaggcaccaacagtgggacagatctggaatttggtctatgctatcgagaccttgcacagcgagttcgagatattccgtgccgtactgtctggcggtgggagtgatatacttgcacacgagctacaggctgtgggcttggccattgcgcaccccgaaccatctgctgcgccagggaagcccatcccagtcaccactagccatctcggacagctggtcttttcccgcagtagcttctggcaaggagctggctcacccttcggtacccgcccagcctgggttgctgacccgggcatttacagctatatgagaaagccgttgagcaactacccttcccgaccccgccaacacacagtcaccactggtttccccgagcgtcgagtacatgcccttcacccggtacggccaccaaagccatcccccggctctcgcatctacagccgctacattccacacttgaacgaatttttctcggtctatgcactagactacacaaacgacgaacatctggggcttttcaataagtggcagaatgaccctcgagtggctcaggggtggaacgagactggtactttggaccaacatcgtgaatacttgcgcaaaatccaggatgatccccatcagatcgctgtgctggccaagttcaacgatactttcttttcctatcatgagatatactggacaaaggtatggtttctattttctccagcaacccgactatggctaatttaaattacaggaggaccatcttggtgcgtattacgatgctggtgactgggacagaggccgccattcgctagtcggtgatgagcgtttccggggcccgcaccgcacgattgcgtggtggtctggattgatgcattacatcttcctggatgatccacgtacggagtttgtgactggagagccaaaatactcgaatctcgcccctctgacctacgaccatgctacgggcatgaacctagccaagctggtcgatctgccacataaacggtcggcgctcatccttggtagcagggaaaaattcttccatgtagcacccctacgatttgacgggtctgatactctcgatcgcaatccattccgctcattgaagttgtgatagtcggaaaatgtgaaataagatgtgattgtattatgcatattatggacttgtgagcaagacttcagacgtataccgaggcagattcgtacgtaagcctttaatccacaattacctaggtagcaatgaagccaagcagatcctcttcacgacagtaaacaaagcgtaatctaatcagattcgggatgtccccgggacccctgggacccgatattttgagtttgacagttgtaattttccccatttaccctaaaaagtaaagttcgcaacagcagccaagcaggtctccggggttaacattccggaatagaacacatatgtattgggatcggcgtatcctaagaaattggcaaaccttcccaagagaagccttcgctcggacgaagggcatacggcattcttggcccagccccgagcccaccccaggcccacccccaagaacctccaagcccaaaacaaaaaaaacaacaaatacatactcttggctcttgccggttttatttactagtcgatctgataaagggttcaatattacgtattgtccgacgtcggcttttcactgtaaattcttggtaatcgagtcattcggcgagtggagtgcatggctttctgccattgcacttactttcgggataaaatagcaaatgatcttcctaatgttctcatctattcacgccgatagatagattttttattatggctgccgaagatgcaccagcgcagaagcgcagcgtatgtcacccctgaatgcttaggtttactcaagctaatatcgtcacagtggagggagaaagctgtcttctttcgcctgtttgtctatggcgagcctagcagatcagatattgccctccttatcctgggccttgtctccgcaattgcctccggaattccttttccgatcatgtcgattgtgttcggtcaattggtggatgagatgaactcgacgacctgcaacgccaacgacaccaatggcgactcataccaagatagtattaacaagaaagtcttgttgattgtctacatcggcattgcctacctctttttgatttatatctatgtgtttagctggaatctgactggtgagcgactggctcagcgcctgcgtgagaaatatttcaaagcccttctccgccaagatgtggccttcttcgacaatctcccagctggagaggcatcctcgagaattactggtgatattaccaccgtgcagcagggaacatctgaaaaggtcggaatcgtgatcaacagtcttgcctttttcgtcaccgcgtacatcgtggctttcatcaaggatcccaagttggctggaatgttggtctccttgactccggcctacttgatcatgtctctgttgggaggatattttgtgcaaaagtactttggtcgcgcactggaaagcatgaccaaggcatcctcggtagcactggaggcattttccaacacaatggttgttcatgctttctcggccaacgcgcggctcgaggaaaagtttatcgagtttttgaacccgtccaggattgctggaattcgcaaatcaattgccgcggccacccaggctggtttgctttactttattgctttctcggccaatgcactcgccttttggcaggggtcaaggcagattgcggactcagtagagtccgatgctggtggcatcaccgtcggggcaacatatactgtgatttttattctagtcgatggtaagcatctctatccgtgaatttggttgaccacttgctgactacttctatctatcagcgtccttgatcctcagcacagtcgcacctttcatccaaagcttcgacgctgcttcggttgccttttcaaaattgaaggctgatatagagcactcatccacaattgatggcacttcgaaggatggagaagtattggcggaggtcaagggccatattgagctgcgcgacgtttcattccgtttcccttctcgtccagataaaccagtccttcagaatctatccctttcctgccctgccggtcaacaaactgccatcgtcggcttgtctgggagtggaaaatccactgttgccgggctagcaacaagattctacgatgcgaccgaaggaaccgttttgttggatgggcatgatgtcaaagacctgaatgtacgtgcattgaggagcaatattagccttgtccagcaagagccttgtcttctcgatcgatcaatttttgagaacattgccatgggcctgatcaattcccctgcacacactcatcttcaaccgattctgactggcactgcgctggttgaaattgctgccgctgcaagggagggacaatctcttgcttccgcctctcttgaacacggtgatcaggcacaagaggtggtaagactggtcgaagatgcttccaaattggctgatgccaacaagttcattgaaaagctccaagaaggttacggtacttcagttggttccagtgggaacctgatcagtggcggacagaagcaacgtatctctttggcccgggccttggtgaaagatccccgaattctcatcctcgatgaagccacagcatctttggactcggcgacagaaatgcgcatacagagagccttggagaccgtggccgtgggccgaactgtcattaccattgcgcatcgtctatctaccatcaggaacgcggacaatatcatcgtcatgagacaaggaaagcttgttgaacaaggcactcatacggagctacaggcagccaatggtgcttacgcagagctgattcgccttcagaatctcaatgttgacaacgctcatgagggaacatccacccgatcggtgtcgcctgtcaatcaaatcacagaaaaggttgaaccctgtctttccgtggccgatgaaatccccgataaagatgagacgatcgatacttctattgcccaagactccaagtccaaagaaaccggcggtgttgtcgactcacacaggtcattttcctcaacagtcagctccctgggctctatgttccgaccgtatgcacttgttctgttccctgccgtgaccggcgccattgtcattggcggcacatactgtgcttcggcagtgatctttggtaatgtcgtgagtaagctgagtggctgtgaggagcctcagaatatccgcgatgctggagagttctatgggcttatgttctttgtcctcgctatcattgaattctttgcaaatttggtcagctggtctctcttcggttggatggcagagaatgtgatctacaaagtgcgagttctttcactgcgatctatcctcgagcaagacctccaatggcacgaatccaatgaccgcaacccatcgttgctactttccttgataaccaaggacagcaatgctcttgcaggcctgactggctccgttgtgtgtacaatgttgtctattctcatcaacctattcgccgctatcattatgtcgcacattatcgcgtggcgaattgcccttgtttgtcttgctgtggtacctttgctcctggccgctggctggatgcgagttacctcactagcacagtttgaagagcgccacttggaggcttttgctcggtcggtgggaattacagtggaggctgtcaactccatcaagaccgtcatgtctctctctgtggaagaagagattatgggaacataccgtcgttcgttggcggcacccatgaaagagataacccgccaaagtgcctgggccaatatttggcttgccatcgggtacggtctcagcaacttcctatacggcctcgcttattggtggggagcgaaaaacatcattgcaggatattattctcagacgcagttcttcattgtccagctagcgctgcttgtcagttcacagctgtggggacagatgtttgccctagcccccgatgtatcgcgagccttccaggccacccgccgattgttaaatctgcttgaccttggaaccacgaagaaactgtcagcccctatccgaacactgcctagcaagcttttgcagtctacgagtgacgtcgagtccacggcagtcacccgcgagaaactcgaagacactcgcaatggcatcagcgtctccttcaaacaggtccgttttgcgtatcccgcacggccagatgcccttgtgcttcatggtttggatctgaatgtcaagccaggtcagtttgccgctttggtcggacctagtggtgctggaaaatccaccatcatttcacttgtcgagcgcctctattcccccgcatcaggcaccattcatgttgatggccgagacgttgcctacggtgacatttccttccgtgactccattgcatatgtaccacaacaaagtattttgttcgaaggaactattcgcttcaaccttgctcttggcgcacgacctggccacgaagttacgcaagaggagttggacgaagcttgtcaattagccaatatttacgacgtcattacgcagcttccggacggatacgatacacactgcgggccaaatggtgatcgcctgtccggaggtcaaaagcagcggctggctattgcacgggcgctgatccgaaagccgaagctgttgctcctagacgagtcgaccagtgctttggacgctgagtctgagcgattgcttcaggatggattggagaaggcaaccaagaacatgacagtgatagcgattgctcatcgtttgtacacgatccgtaaggcggacgtgattttcttgattgaggatgggcgttgtgttgagcaaggcactcacgcccagctggtcgagaggagcgagacctatagggtcaatgccttgaaccagacagtggatggtgaatagaaaaaggtagatagctggggttctcttctagttttgttgatatagatctatattgtttaatctcattctcttatgatagacaatcaatcccctactacatgtgaagataaaagagaaacgtacttgctgtccttgccgtacttcactttcgctccttccccgagctacgtcgagaataagcgagagagcgaccattcgcatagttcacaagaaggacaggtacaagacgacagggcacatagatagctttcctttttcctcactctcttgtacttgtatttagattgaaatgcactcttttcttctgaatctatctggcaggtaacactatatatcgtttcgtgacttttctatcggcttgaatcattactcggtagcttctcccaaacgcatccatttccaacaaactgcttttattagctcaataaatctgggtgggagctcctcaacttactttcatatcctagatcgtcattgaagaacatgttacggacctcgtcgcccgaggacagtcccatggccgggaagtgcccaacggcggtttttccaagggccaaagccatcatcggggctacctcaaccaactccacgaatttgggttctgtattgtaccgctccgctaacatctgctggtggatattgacagctgcgaagtgcgcctggtgcatcgccgctccaccgcgcttaataccagaccaggatgcaatatcaccggcagcgtagtgatatttcttgttggggacatctgcggaaaactgaagaccgggcgtgatttggacatatccttcaggatcgcaggcatccttgggaaggtatgacgatgttggcgtgaaccgtgacacggcattgattacatggtcggcaacgagctctcgaccatctgagagcttgagcgtgtatttcgccggagaagattcgctaccgagaactgtatcctggacgcgtgctcccaaaaccacttcgaccttggactcttttagcatttcaagtgcctttgctttgaaatcatcagggaggtcctcagaggagagtagctgttgccgagagtgaacgagtgtcacctttgcctgaggttggagcatcttgatctcggcggcgatctcaataccgacagcccctgcgacagacaaatcaattagtattactcagatgaaagaagatggcgccacgtaccgcctccgataataaccacgccttccgcagctttctcgatagtctgcacagagtctgcagtttcggcaagatatgcctcccgagtcaaagacttaggcgcactaggccactctcttcgcaagcccgaacacgcaatcatgtagtcgtatttttcttcgacaatcttgtgcccgtcatttgcagtattttgatggatacgcgcaattcgggacttgcagtctatcgagtctactcgtccttggatgtgattgatatcgggggactggagagcggggatatcctcgaactttttccagaatgtgctagcatcagcgttggaagctatggccaagggcagtccgatcagatggtctaaaataattatgtcagtgacgtgctttcagatcccaacacgatacacatacaatatccatcgcgctcatccacaatggttacttgcacaggaatcgtgttccccgggccctggtcattctcatccaggctgaatcggcatttccgtccatgacaaaggtcaacgaggttcagagtcgcggccaaaccggaataagaccctccgacaatgagaaccttgaaggggggctgttcctcgagactaggcatagcggcgatcagtataatgagctttggggtaatagaggagaagtttcggggatgggggaaagaaaagaagtcaaactagccggcaaatcgacccgagcaactgatcggaccaacatgactaggtcaaatgtctcaatacccgaccccggaggaaatacagccccaattacgcatgtatgtaactttaaatttcagtgcaaccttgtcttatcagatccgacttcgggagtcttggcaccaggaaacttataatttgttgaatacagatgcacttgatactactccgtgtacactgctacattcttcgactatttccgattcctcgataaaccatacattcttttctgtattcaatatgggcttcgttgttgtccccgccactcttcccgatatccgggccatctacgatgtctggtttgcggctttcaaaggccaattgatcctagacctcatctatccaggaactgatctcaacgatgaggctttccgcaaggtccacacagaagggactctggaatattggaaaggattgagcatggagcacacttttcaatgcattgacaccgacaccggtaaaatcgccggcatggcaacctggcaagtctactggcgggaaaggaccgctgaagagcgtcagaagccctggattggatggttggagggtgaccaacgagagcgtgccgaagggtttttgggacagctttgggagaagagggagaagtggattggccccaagaggcatgtgtgtgagtggtcaccgatccttatattgaaaaaacattgaaaatgaccctatgctgaccggagatagactgccacaccgttgcagtgcatcccgaataccaaggtaaaggtgtcggggcacggcttatgcaatggggaatgagcgttgcggagcagctgaatgtaccgatttaccttgagtcgacggtggagggagtcccgttgtatcaaaaacttggcttccaaactctctcggaggacatcctattcaagcctgaaattaccagggtcgacaaggaggttcgagcaccactcatggtgaaaatgcccatagctgcgggaaacatgacatttgaggaatgggtggaggacaagagtccctctgtgaaagctacataggtatctacatattcttttagatgttcaatgcacatagatgccacatgccgtattgcatgccaagatcttatttttcgacgccaagagaacctctcatgtggtgagaacactgtagacataccttccttagcctacggtgtgtaaaatgtgtctcggaacctaagtttcccgaatgagcgagaactccgaccagttccggagtaatcagatggtaaaactggccatcccttttccattagtcttggtaaggagcctagaaattactcggaggcccaagcggagacggacagccaaagccaagacttggcgtattcttggttattaaatgtccacgggtgtggaaaccttttatcaatctaattattattgagtcaaaaatgacaacaggggtactcttttgtgcggccgtcattccctgacttcaactgaaatttatcgtatttattcaatagcagtttttacatccatgtgggctagaacattactgtggagataataaagggtctgtacatcttcaagggattaagggattggacctccaaggaacatgttatgaagtcgtaacatacggagtactccgtactataagcgaactccaccaggaccacctcggcaagtgtcgatcagtccctggcgtggcgtggcgtggcgtgcattaacttttactgataccgcgaaatacctgtgataccaagcggacccctgtatcgtacggaaatatcaatgtggggccgctgatcttatctgatcaaggattatcagatggcccacaaacccgtctgtatacccatggacctagactaccaacctgaattcttcagttctctaggcgatcttaataacgtgtcagcagacattaaatcactcatatcagagagtgaatgggctggccgatatcggctggacgcggggatttctgaataattctagtgatatatttatttgagtttgaaaagaagcagcatttccctctttcaggaaagttgactttgccatgcgtctttcttccgcctttgccgccctttgcgggctccaagcgacccttgtcgttgctgagaacaccacttggccctggcgaaccttcaagtccagccctcaccagcctccaagtctccaaatctccaaatccggacctaccagccccggatacctcttctttgaccaatcatggaacgcacatcagtacggtgtgttcataatgtcggacagtaatgagcttgtttggcaaagcccgcccggtgatctacaggatttccgagtacagaagctggatgggaagcctgtcctgacgtacttcaacggccttggagtcccagagccgttcggatggggatacggcattgttcaagtcttggacgagtcctatcgaagtatctataatgtctctgtgacaaacgacaactacaaggccttgggcagcattgacagctcctctttcgtatcatggattgacatccacgagaatacaatgacgtctgatgggacaatgctggtcaccggctacaatgtcacccaggctgatctcagttctgtgggaggccccaagaacggttggatcgctgactcgctcttctacgagatcgacgtcaagaccaatgagatacttttccgttggagtgccctcgaccatatcaatcagattcccttggaacatgtacagccattctaccctgttcgagactggggacacaacagcagctctccctacggctactttcatatcaactcagtggacaagtttcaagatggaacgtacctcatttcttctcgttactactgttcgctgttcaagatcgcgaaggatggatcggtggactggacgctacaggtaaataccgtctccttcaagtgtgttaaattgtggcccatatactaataacatacgatagggtcaaggtggcggcgactttgaactcaagggaatcaaattcagttaccaacacgacgcccgcattcgtgacgagactgaaaatgcactcattcttagcatttttgacaattccaactccgatgtccagaacgggactgatcacaccgaaggcatatttatgagcgtcaatctggccactcgcgaggtctcccctgtccgaactctgcacgatcaacgcgatgagatcttttcgacttctcaaggaaacacacaattactacctgcaaatcacgttgtgatgggctacggatcaaatcctaaaatcaaggagtataatgccaacggttcttgtatcatgactgcccagtttggattcgatggtgtcgtttcaagttaccgagcctatcgctccccctgggtcggcgttcccgcaactccccccgatgtattctcttgtattgagaaaagcagcaacaagaccaatgtttatatgagttggaacggagccactgagcatcaacagtggaaggtttttgggggcgctactcgttcagaactgagtccggtcgcgatggcacgaaagacaggatttgagaccgtggcgagcatcaaaggatatcttggatatgtccgagtggaagctcacggcctggggatccagaaaggcgtttccaaaattgtacccgtgcagagtcagtgttaggtttcgcatatgattgcaatatcttgtaattttagtgataatagacaatgaaaacgtggactataccagtctttctagagtaccattttcagcttttatgagagagcaaacttctacatacttgaatagtgcttactttaggtgtgatcctactcgattacaagctcctaatcatttagagattgtcttgagcgagccaaaatttagaaaatgatgatgtactcttcttcggttctagatggttggtattaatcgcatgacacccaactaattagaaacattactacctaccactgcactaacttcaatctgacccccataaacttcatctgccgacttcacacttctctatcaacagcatatcaacttaaataacgcggcccctgacctgcttaagatcctttatcttgatatctctccacatcccagcacatccccaggcaactaccagcagacaaacactggtcaccagcatatatcgctgcgcatctccataggcgtgagcaatagcattccgagttgagcttccccacggatacgacagctgggccgtgatatcggaataaaccgttgccatattcacatctgctggcaggtatttggtcagcgccttcgggaattgactggtccagatagcagcagacacagttgatccaattgcactgccgatgctaccgaatagatccagcatagcaaggacaacagcaatgtgctggtgatcggaaggcgccatcatagcaagctcgccgcaaataacagtggttccaccagccacggcaacaaagatttgcgtcatgcaaatatacccaatattcgtatcgggctgacggaatttgatcatcagcccaacgcctagtatcataagcgggaaggagaagtaaacggccagccatttgaagcgaccagtccagcggatcaggaagccgacgaggagacaaaagagacaggaaccgactctgtaaatggctgagacataactggcttctgtgacatccagaccccaaacaacctggagcattgatgtgaaataactaccccagaccattgagttgaaaaactcaaagacgaacattaaccctccgaagaagacggttcggtccatcagtaaattgaatgggatgaaggtcactggagcccagaatcgctcgtagacggcgaacaagatgagcaaaaggcctccaaaaacgatcatgcagataatcattgctgaccgccattgatccttttggtaagaccagaggctgaatggaagaaggaacaaggccattcctcctgccagaagaatgattccaatcaagtcgatctctatgcagtatttcttcaatgaagcaaaggtgacatggccatggctggacgcgagcaagcccatcttcttagcctttcgctgattccagaagaacagaagacacagaggtgccaccacaaccggaacgataatagtgaagattccgaatccccatcgccagccagggcctccgaggacactctgggagattggacctccgatccaagtggtgatgacgtatggcgaagttgcaaaagataacatgagggctcgattcttcaatgcagaggtgtctgagatgaaaactgtcaaacaatagctgactccttgggatctagaagttgttgcagttagctaggctgttcgaaagacagatatttcccaaatggttatcataattcataccccacggatgagaaaacctgcgcagctgcgtatgtctcaacgttgttgcatgccgccatcatgatgaatcccacaacccaaatgatcagcatcaaactcataccctgaggtcgaccccacgagtccagaatctttgccaatggaattttactcaagcctccaatgatattggccatgatactcgtggcagccgtcaaagaatggagcctaaaggcactggtcacgtatgggttcagagaacggatgacgacctcctggatggaggtaacaaagtagataaaccatatgcttcacacgtaaaagtcagtgatttgaatgaatataaacattggatcatggagagattctcacatcacatatgccaagatcatatgagacttagtccacacggccgcagtggcctgaacacctttcacaccagcctgagcctcttgatcaagagagtcctggtcggagctgccatgatcctcagcggtatctttcggtgtgtgggctgtctctggcgctttctcggagggatagaggacttcagagcccatctcgcgagcgatctccgtttctttcgatgccatggcgaaagactctacggttcgaatactaaactggctaaaaatcgccgatcagtgggatatatatataccctggcatatcagacatgcattatccgatatcggtaataggaaagaatctgcaccaatgagtgtgttgactcaaggaaagtgtccggtaagtaataatttccattgccactagggagattagttgaggccgagccccttggcgcgcctaagcgtcgagaagatgggtccataaccatccctgtaggcttcctcggcccaataaactatgtcctcgtgctcgagtatttctgatgccactccgggactattcgattagcccatcctagactagtttcttcttacctcttgccctattcagaagacatctccggtcaaaccattctcgagggtggcgcttttcttccttgtcgttgtctatggtcctagtggtattttttgttttgcggtattagaaaaaaataaacttaaattacaaacgcgtatttgagctttacagcattttccgtagtacttttgccctatctctccattaaaccatttcgcgtgttgcgcttcatgtgaatatctctagagtaaacttcttttcttgtcggatgttgatttcctatttgagctggcgttcctttcacatccccgaagctgcagccttggttcagcaactctcaacatatcaatatcaacatatcaatatcaagctgagaagagactcgctagcgtactggaggagtcattgcatgccctgttagaaactcagtccaaggatgctttgagtaacgagcctgagttgtcgaggagtgtgtctaggctaacaatatttcgtttcatgagttgctgattctccacaagtgtctcacttttgctaaagtccctagtattataatgattttgtgttccttttccgtaaaaccggatttcatatcctgtaatgaaatctaccgatacatgcttcccatatacctactccaaacactagaacactagaggcctctagcttccgacgcatcctagttttacgaaaacgagcccaggaacgagggtcgagcaaggcctttatctgtcacctgcacagataaaactcactcaaatttagtggtgtctgtcttgaattccgatactacactccgaggacttccccaagaactactcgcccatgcagtagtgaatattgccattgtgcattgtatattgaagagggttatttggaagtcgtggttttgatttcgacagtaggctttacctgtggctcgattttggaaacaaatccatctgggaattcggtattcttgtaatgcagcttcactttttttcagctgaaggatatggttccagccgaatctatagccaatatctgagaggaaagcccatacgataccagatttcgccgccagcgtagaatcatacgaccgaaagcgtcgaaagcctctcgaatccgatccttttgaaacataaccagcaagacaatcgtaataatctctgccatcagcggggtggagaaagcccaaaaaaagcgtcgaggagctgttcatattacggatatcaatatgttcataccgagatagctagtcacaaacgataacggcataaacaccatagtcacgatagtgaaaacaaggatggcttttccctgagtctttctatcgcacgtctactccgctgcacgtctggttggccccaggtcagaacttgcgtaagtttctcgcctcttatgataggccttcacgatatgtgcgccggtcatgagtcatgaccctcatcagcaggtcctgaaaggcatcaatcaaactctctattagctgacaccccatgctgggtctgagctgcccgtttgcaagcttgtcattcgactcctaattaccatagtatgaggcaaagtacctttttaggtgtagtcgagtagactgatgcttctgaacggtctctaagtctaagtagtaatcggtaaacgttcactgagcgttcactgaacctcatcagttattgcattctataattctcttgcatgatcaacctaatacatacgaccatagggtgtggaaaacagggcttcccgtccgctcagccgtacttaannnnnnnnnnnnnnnnnnnnnnnnnnnnnnnnnnnnnnnnnnnnnnnnnnnnnnnnnnnnnnnnnnnnnnnnnnnnnnnnnnnnnnnnnnnnnnnnnnnnnnnnnnnnnnnnnnnnnnnnnnnnnnnnnnnnnnnnnnnnnnnnnnnnnnnnnnnnnnnnnnnnnnnnnnnnnnnnnnnnnnnnnnnnnnnnnnnnnnnnnnnnnnnnnnnnnnnnnnnnnnnnnnnnnnnnnnnnnnnnnnnnnnnnnnnnnnnnnnnnnnnnnnnnnnnnnnnnnnnnnnnnnnnnnnnnnnnnnnnnnnnnnnnnnnnnnnnnnnnnnnnnnnnnnnnnnnnnnnnnnnnnnnnnnnnnnnnnnnnnnnnnnnnnnnnnnnnnnnnnnnnnnnnnnnnnnnnnnnnnnnnnnnnnnnnnnnnnnnnnnnnnnnnnnnnnnnnnnnnnnnnnnnnnnnnnnnnnnnnnnnnnnnnnnnnnnnnnnnnnnnnnnnnnnnnnnnnnnnnnnnnnnnnnnnnnnnnnnnnnnnnnnnnnnnnnnnnnnnnnnnnnnnnnnnnnnnnnnnnnnnnnnnnnnnnnnnnnnnnnnnnnnnnnnnnnnnnnnnnnnnnnnnnnnnnnnnnnnnnnnnncgccggtgagttagtagttgggtgggtgaccaccagcgaatcctcactgttgtatgttttttgtttttatcgtctttgcagcaaacaataaggctttgaagtcatggaactaaggcataagaggaaaagagtgagattcaaacaccagatgtgcttcgacctaaagtaagcacaaatacccttggcatatgcagacagccccaaatgaggaaattgatccctatcaattcctggttaatgcccaacggcatgcatgggcattttggaggtcttgtttgacgcctcgattcgcgacctagttaccccacataatcctcagttctgctaacagccgtctcatcgagttgctatgctttggtacatcagggaaactcaacttgcacacaattcctgccgtcggcttgtcacggatggagtcacccaactggccaacttcgcacgagagcttcgaacgtcggggtccggtattatcgtggaggaagaccttgctgctatttttgagcgagggcggatttcacctgtgatcgagagtgaattcaagaagaatgtcaacatctagaagtttacactgctatgtcatagatcagagctcgatttggaggagggaatggggccgaaaatactgcgagcattccaggagcgaaagtacctcgcgaccgtacctacattgtcgatgctcggttgtttatattcctctcaaaccctggcgaggatgatttcgaaatccatgactatacgtttcaaggtgaaggttgcggatgccacggcggacccgggtttgatggtgttatgaacaagctggtggcttgtaacagtcagtccacggaattccaatgatctatataccgtgagatagtagaagacgagctacagaagtccaagtccaaaagaccatctatatccttcaaaacctcttggtaggatattctgatgcacgtacactatctacgtaactgaaaagagaggagttatcatcccatatgtatatgtgtaagattgattgctgatgatctagctactgccatacctttcaaataacttcatgtggacaaagacacaaagtgcttctgctctgggatcccggggagacgtctctgcaagatgcgaaaagggatctaccgtaccacgctcctagatatctggtaaggaggctgccaaagagagacctgcctagctgcataggagtacccaacgctcaaatgcatcagatcactcatataaggatccccccaacagggagtgccatgtggcctaagcctacgatgaacttctccagctatctcccaatcaacgaggcccacgatcttgtcactgtcaactatacagtgacacttagaaaagtcgttgtgcatgaagcttatatccagatcggaagaggatctcgcattctaggggttggatacggccattttggcgaatctttgggtcgggcacgacgtaagaccgaatctggtatccatcggtaggcttgacggagtgcagctgtcgaagtatctcccgtgcttgctgtttgaatgagtccctttgggcttgcgaaaggtattgccatgcgatggctaatgaaacgtctgggagtctttcctggacaattattgggccgccattaatctaatgggatttaagtactataggcgcaatcaagcagcgagaacaagtaccttgccagtaaagtaaatatcgggcactctaatatctttcaagacattcttcgcaatagcaatcgcctggatctcattggtgccagcatacgagtagtcgatctctatatgctcggcaccttgcccgtggaggtggctcgacttgacgatgatactaccaagagcgaacacgtcacgaccaccttcgtcagccggatatattctagcagattggtcgcaaagcctggtaaccgaagcccattaatccaatgagtctctggactgatttaagaggccattatctgttctctcgttttcaatcaggtgctccggggaagttagtcaccctctttcgtcggagttgtaatgctcttggtgcttctgggcatgttatttcatctactaggacatgtgctctaaacgtgagtcgacagttatatatatttccgactaatccttgataaatatctcactttcattgcccagaatgaagagatctctttgtagcatctataggtccatcttcatcaatagctggcatgatagtttagtactttaagccatactaacttatttgatcctattatctacatctactatccacatattcgaaatggcatcgaaatgtcctctctgtcgtgaatgagttaagacgagcagtgctccccatctttgcccagtcgagaaaatgccgaacgccgagaaaaagctaccatcgatgttggtggtcaagcaacagcaagacgttgtcgtttttcatgctgtcccgatctgagctgtcagactatgtgagttgatacccgctggaaatgacgttgtgaccctcattaatgcttcaaaatcccagattctcaacagcttggtaatgcaactagaatatgccacgcccgaacagagaaaaatgagagcttgcgagttagcagggagtgaacttatcattttatcattttagccttgtggtgtccttgagccctgttatgtcattagttggaggacgaagacccgtggagtgcctgtctgagcagaactattgtagtctgtaaatagtacataggcaagacagtttcatcacctactaaacttggttgtcgaaataattaattatatcacatagttaattcaagatagtactcatatcactacaagtaaatatattccaatctgtcacggataacccagtggaaggctcaccgccatgccaattaccctgcttcggccgccaaggccagcaggaaaggtgcctggtacgaatcccggggttggcattttcactcgtgcgagtaatccacgacgctggaggccactaagcaatggaaatgacacttgagggaagcaattctgcagagacatttccaccccgggatggcgtcgccagatgacaccgtcctgttacaggcaaattggcaattttgtgggacaactactattttttttgctttttctttatatacatgtattgattgtagttagttatatctaggtctactcagtaataattattgccatgcctcttgaagcttcattctgggagataaattgagaaacaagttaaacacgctaataatagcatggtaaaaatgtacaagaacgtgagaaataaacatgaaaagaaatgataagtgttcataagacaagagaaacaaaatactcaaaccagtccatcaaggtgtccccatatgagtctcgtgcgatgcatgaaccgaagtattctgcgtctgctccaagaccacagcatagaatttgccttcttctgaaatatcacggtagggacctgcagagacaacggccctgaaacaatgccaattagcatatgacttcacattctgatatcagaaaacgcccccaaaaagagtgacaaagaaaatagaaaataaaaacataccatcccttatacttcggctgattgaagatatccgtaaacaccctcagcactcgcaacggcaactccagcacagaaggcatctcaggcccatcgccacaaatgggtaaccccagcttgttgacggggagatagatggtctcggcgacgttctgcggattgcgcgtctcctggaagatgagaaggcggcgcgaggcgtgcgacggcggtccgcctgctggcggtctggcgtttgcgcttgcgctcatgctcatcgcgaaggctttttgagtgtgtagagtacgcaataggtttttgcggaggtctgtgttggattttctttttcttggacttggtgtttggaaggatggattgttcagtttggctgttcctttttttttttttggtgttgtcttttacccgcttggacttttctgctgggtctctggcttcgatgcttagaggaagcgcgtttgctttctggggttattagtacggtctctttgcatgtagttcaccaagggcttcttactatttgtcgacagtggcgtgtagagggcgcgacaggctttgcttatcgtttggcgatcagtgtcccgattaggagatcgcggggcaaaaagggggggatttcagagatagttgtatgtggaagatgaagtaagatggaagttgaatgtcgactgttggttttaagaagaaaaataagcccaacagaagagggggacttaatgggcgatattatgattgttgtacctactgaactaataatctcatacacaacatcattgatcatgacattaattagattattcctatattctagagtctagtctcccgatgacctaggcacaataaaatcaacagctaacagagaaagaaaaagaaaacgctgggtatcatgataatgtggccgaagagaaataagcaaaatcaacaaaagaaagtcaatcccttaaaccagggatgaatcatggtatatggcatcattcactatgcagcgagatgagaagcgatatgatcaaatcaagcatcaagctctccctctagcactctgcgtgcagcatccagacgacgccgcagcacccgcgcagccttttcatcggggtccgcagagctcgtgattgcctgcagattcatacagactttaccaaggctggcgaacagtgcttccagcatctgtgtgtcatcatcgttgatgccaccgacactgggggtgctggatgccgcgcgcacggtggagacgagggacgagacaagagaggtcggggttgcagaaccggccgtggctgaggatgagcggccagtatgcttctgaggggaaaggttgtttgggtccagtgaattggtgtggtgccgtggtccacggggtgtttcggagcggtcattctcagcctcgatctcttggattggacttggctggtagctgtggtgagtatgagattgggaatggctatggctatgtccgtgtcgcagctctgtccagggattagtgtcggaaacgtgaggggaaaagaatcgcgggaacgcaccatggttaaaccgtcggtcccagtacatcacgctgtcaacgtcatcctcgtcatcgggacgctcgccttcgtttgcggtggcgaaggttgccacggtcgagacggacatgttgctgttgttacgggagtgccgctttgtgtatgcgggccgggttgtctccactgatccgttcgagctgttgcttactcggcggagttgctgggtgtagttgcccagtgcactatgcaagatgaaatgctcatagtcgaacgcatcctcgcgcagctcgtggggcgtcgcgtccgtgtgcgacggcacgttagggaagacttccatgtcgctttcgaggtcatcgtcaagcggttcacgtaagatctcatccagagcttcgcggtcaatttcctcattaaaatcaccttcttcggcatcttcgtacatggtctcggcgatagattggtcatcgccatagtcaggctcattgccctgccaattctcggcgtgcttggatgcatttccagcagcgtgctcggcggatctgcgtcgatcttccgccgctatctcattcgagacatcccgagtgttttcagagctggcttcacgtcggggattggagccacgactgctctggccatctctgagctccagcgcattcgcataccagtgatcggcggccgtcaaggggctgggcgttcgcaggctttgcaaactacgccggcgaagattgtcctcctgattcttcaccttcagagaagagattttgatgtgaagccccttcatctgatactggagatcccgcacctgcagttgcgactgcgcgcggctagggggaccaaaggagctgtagactggactgaaaccatccgggctcgatttcgattcctcctccgaggaaatgcccaagccatgtggcgagcccgacgaactgtcttcggtgaaagcaggcgattgcgccccttggccctccttctcctcttgcacatgtatcggaggctgggtagaagaaatcgatgatcggtgcgtcagatacgccctcgtaggtgcatagtggaacgaccgatcatcagtatgaagactggacgaagtgctcgcgcccattgcactgacagagcgcgaaacttgcttgtcatcattcgagaagctcgaatccgacggaacaatcgtctcagactgaccccttgaatgacgattattcgtcgtatcctgcgacgtaataaacgactgccgtcgaagcgaaaagctcttaggatccgtgcgcgaaatcgaccgatatagtacacccacaggctggtgcaaacccatcggctggatatagcccgaattcgagggcgagggcgatgagggcgatgaggtcgtccgcggcgtcgtcgaccgagctcgagtgagattgttctccataagctgtggattcaaaggatgttagtattactccctagacaagcggcaagctgcggcgcgtaagaaaagaaaccaacatacattcaagcgtttcttcgcattctccaaaatcctttccgcctcgctactcagtatcgccgaggaaaactcctccccgggccccttgccctctgcagccgcagacgccaccgcgctactagcaggcacggaagagccccctgcagttccaatgaccgcggtagcttgcgctctcgcgacctcggggtgaacgggagattcgtcgcgtccgttttgcgcctcggacacatccctggaagcggaagcgcgtctgctccccgcactgattgtggaattggagctactccactccctgtttggatcatcctgcccacgtaatagcggtgagctggctagctcttgctcatccgagtcgccgaatccctccaatctggcgggcgagagctcctcgccgatatctgagagacggcgactgacattcacgtcttcgtgtgtccatgcatgacgggaaaaatttttcttctgtcgactggatgccgacatggaggcattgggatccgattggttgcgggagttgaagtacgcgatttggggtggggaaggagtttgggattcgcgttcgacttcgtatggtaggatcatgtccgggtctgttagagtgagtgagggcatgatttcgctctctcaggccctggggcctgggggggttttccgtgcagaattggtagaaagagagagaggaaaagggttgaagtcgcagaatcgtcccgtagacgggttgggtaccgttacagttagtttctccccttagacagtttagcgtgccctgatcattgccttattgggatctgtgaagatattcccaatttcctgtctcatactctccgtccggagtaaaaaataggggattaggcttcgactacccttgcaattgtcaatcgtggtagtttaagtagtattaggtataaaatagttagcgggtgatagatcagatcaatattagactatatacggagtacggaggacaccgcgagaacaataggctttctcgggttataataataaaattacgtagaaaaatgtctatgctttagtctctttctttaattaggattgtctccgactgttcgagccatacggtgtagtcaaagagacatggccttgagatgtgatgtatacctatgcatactccgtataggatgcattattgctgtaaggatatgacacaggcattttctataatttttaattgattgcactatatactcacagtcagctgagtatctccaagggtcctttgctatggttaaaataacaatggaggaacccctgagatcggccagccatatgcccaggtgagtctaagttccacaccggtggagattgtaatttcagggacatctcaacgttcattagaggaaaaaagatataaacgttgagaaaaataagagaaaagagaaaaaaaatgtatgctttttgtatacaacgtaattacacatgccataatcccgtagaaacgcttatatctagatcttcgatagcaacaacttcgcaccactgctactcgggctgggcttcttctttccatccttctccacgactaacgccgaggcctgctccagcgccttcttgttcttcttcagagtcttgagcagctcgctcttcttctcaaagtcctccgactcagccagcgcgacaataacgaaggggttagcccccgtcgcccagtctaggatctcatcctggatctgcgcgtacagcacatcgtggaagttcaacgcaggctccactttctcgatagacttcgaggccgggttgaatcgtccaccctgcacaagagacttgagaagacgtcccgcgtgtgcggtatcgcgggcttcggtgtgcgacttggcggcctcggccacggccgcgagagcggcggtcttgtcgccgtcggcttcgaacagcacctcggagaggaactggcagccgaaggtcgtctcgaggagggtagaggcgcgggcagcgatgaattcgagcagtgttggcgaggcggccttgacgagttcctggcggcgcatggccgggtctttcttcgaggtttccttgcggacctcgcggacttcttcaaggaccgtttggtcggcctcggggagaagccacttgacgcgctcaccggcgaaggggtatagcacagcgatacgtgcggtcaggtcgttgacctggtagcagagttcctcgttgcgggcctcttcggtttcattctggttcaaaagctcggggaagaaggacttggcgctaagttttgtgtcatcaatgacctcgtacgcggcaagaataacctggtgaccgtagacgtcgccagccatggccttgacgatgtcgcggaagaatcgtataagcagcttgcggtctttagcgttggagtatgcaagcataagacacatcaagcgggagccggactgggtgaaagccaagttcttgatcaagtcaccctcttcgtcacccttgatcagctcgataaactcattcgcttcgttgctgccgggttttgtgcagaggaaatattgcaacatagcatcgtgaagcatggtgaaaccagtgctcttcttctgcaccagctggttaatcagctcgcgcaagtagttcatgatcggtccacgcttctcggggtgggcttcgatgatcttcgcgagatcggaagtggtttcattctcatcttggaaaatgacaaactcgggaccgtaccactcgcggaggagtctggccttctgtgccctggtcgcaactgtgcggtagatgtcgtcgagaatccatgagccctcggggtggcggatgagacgtctgacatggccgtagaactctgggatgatcaaatcgcgggtctcgtcgtctccgtggacaatcaactttccaaccaagaacttagcatatcgactttgcgccagctccttgtaagtgcccttcaactcgtgcgcgatcagtttgcgctgctcaaggtttccgtacttgagagcagtctgaatgactcgcaccgagtcgtgcttgaacacgaaatcccgaacgcgggtagtgatgatctcaaacagctccttgacgagcttctttctctgctccaaaggcacatgggacttgcggcgcaattgctcccacaatttcttggagcgggcgacggtatcggcattaggctttgcggccttgcgctccagctgaagtgctttttgcttgaggtgggattcgcgagagtctaagcgcacaataatgattagatgtggcatcgtcaacgaggcataaatgaaacttactgttggggttctttggggcctctttctgcgctctttcctccgcattgagtgttctgcctgacttgggcttctcctcctcctcgctcacatcgggcatctcagcatcgtctgaaagggcatcaatatcttcgtccgagacatcgtcaatgtcgaagtcatcctcgtcttcggattcttccatctgaaccttctttgatggcttcttgtcgctcttgctggatttggggtccttcttggagtctttcttggatgaagagctcgacttcacggacttggacttcgatgcggagccttccttggtcttgctccgcttgccattgcgctcttcgctgccgtcaacagcacgcttcaatccagccattatgaaagatgatttccgtaggctgaagggtatctccgattgaaaaaagtaataaaactggggtctttgcgagcggagactgctcgatgtcctggtggataattttttttggtcgcaggcggaggaagtttttttgccggctgtttgcacagtttgcactgataagatacaaaatagccctgccttttcagcaagttcatacatgtactagtatgtagcaatgttagtattcaaataaccatttatatagattcttacagaaatagatcgaataatacgtgtatatgaaaggacagattgctatggacgttttatgataataaaatgtaggacaatgtctctgaacgaagcacagatgactcgagtcgcaactcgacggcaacagatgtacaaaatgctaataagtgacatgagccactagactctccagggacaagatgatgatccctactgccatcgaccaaatcccgaattatattactcttgaacgagtgtggcttgcatcacccgaaacaaacccgaaacgccgtagagagaatcacaacgcattaaagatatttcatcacttcatataccaccggggggtgcaggttcgaaggaggttgctttcacagatgccagctctgatccgccgccactctggccgcgcttccgcccaggaatgtggaagccgaaggacgaggtagaagacttggacccggatgattgcgcatcattactagagtcaccaaaccgggagaggaagccctttttcttaggtttctcgtcatttaatcctacttcttcaaaggcttcttcctccatgattccagacttggtaaggctgatggactgagtgcccgatggggttaatcgggagaaccgagagtcaagagaagttcgagaggggccagcatcaggatggatgatgggtgagcgggcggaaatatcctagattgaagggttcatgtcagtcgggtttatgcggatcggatcgggtcgcggggcatacaaatgatcggcggtaagagtcaaaggactcgcgagagatggagaacggctcattctcgtcaactagatctcgatggttgatggttttgttggagcccgggtatcggcgccagaaactcggccgctcggggggggaaggctatcacggtaattagcaggtgtatcatacttcccgatcacacacagcctgtaccggaagatagacgccgctgtcgttgaccactagagaccgaagtcagcattgcaagcaagtacacagccacacatagccacaacggggattcgaacataccactcaatttgtactcggtgggctcatcctggctattgcggatcggtatgggcgcaggacgttgatttggagagagatagttctcatccacgggagcgggttcctcattgggttgggactttcgtcctagaaagttacgaaatggaggcatggttgaagaagtcaagtgtggagatttcggtgatttcccctgtgaagggtcccacgttagggtgaaagtgccccccgattctggagcctacgtcatccaagaagtttgtgaaataatgaagaccatcagccaatcagattggaagaaaatataagaaatattacataatcttgtatctgccctgacccagtccctgatttatgtccaacctcggcgcacatgcacaggaactggtactctacataaacagactacttctactcaaggaatggattaaatttgcctcatacattcaagcctaacgaataaagctttagagctacaaagatcagaagaagaaaaacatacccttcaacacctgcaaacacccattgaaaaagatcagaacattccacttccatggatgccttcgatatgttccatcgcagttcgcttcatgaaaatagatccacctgcgaacaaactccataagcaaatcaaacccaagaccggcctcaattcagaagctaatccaggcttggactgatgccatgcatttcgctatcactttcgtaacagtgagtctcaccagcaattgacctatactgataacgcaaaggacgaaaaaaaggtgactcggacattgtttgttgttgattcctttttgtttttttattgtgcttttaatttttgggttgtcagaagctaagtggcattgttgggctccagaagattggcactgtggtggcaatccagagagcgcgagtcggatgggtcgaagacggcgttcttgcgctgttcgatgaagtaggctgtgcagaaaaggaatgttagttaaggaactccaaatatgtgcaaatcatgatacaatgtgatacgacgtacgggtcagttgaatcatatcaaaccagcggacggcgttctcgtcactgccgtcgactgccttcagtataccattgtccgggcggaaggtggccttgggaggaatgtggcgcatgcgcaagagcatctccaggatgtcggcgaagcggtcagactggttgaagtagtagggaggacgcttgtcaaggggccactggatggattgttagtgtgaaatgcatcatggaagaataaacatggaccacttacgcgctgagaaaagttctcgttgtcccatgagcggaacagccagcaggtgcgttccacgcagttcagcaggataatagccacaatgaaagtatcgaaccagccgcacttctggcgctgaaggagtcgacgttccaaatcattgataacaaacttgctcagctgcgaggcacgcttctccatggcggcgcgcaactgactgcagagaagtccatatgattccgggtcagagacctcctcgatgggcagacggccctcgtccgatggctgagaaagagagtgcaacgagttcgggggcagagtagggttgtagtaagtcttccaggtgagttctgtgtcgacgagaatgtgggtcgcgacccacagctccaacacgcgttccagaaggatatcctgtatctatgtcaatgcacgttcccacgttgaatatcagaaaacataccttctttccctggctgagttcagccgcaagcagcaaagtgggcttcatgaaaggcgaggtctctcgctcgtagaagtaagaagcattcttcttaatgtacatctccaacttatttgggatgtcatccgagtccgcgtccaggagatagacttcttgcgaaggaccagagaactggtcatctccgagggcttgcaactgggggtcaagtgcagacactgaactgcggtgaccctgcagtccactgaaagtcatgaaggaattgctctcctcgaagtgagtaacttcaatgcgaccggagtagtgttcaaacttgatttgatttttgatgctgttagtgtcatggtaggcaagggtagagttgagatctaaagtccgagtcagtatatattatatcttcaaaaagaagagaacacaaaaaacatactcgcattgtatagttcaaactcatcggaaagacgggtgcgcaggcacgggtgcttccataggcgggcactctccacgctagcgcaagttgtgcaaggggtatcgccagagcactatcaacacttgtcagtaatattcacttatctcacacccacacaggttccaaaatccatacaggtttcttgagcattcggcaacgaagacatgcacccttcttccgcacgtcttgaacttcacggcgtcgctctgcggtgaaacgcccccgcaccttgggtttcataggcttggttgagttaccaaactcgttcacaaacccttttgcctgggtatttgggttcatcgcaatagggcgggggtaagatgcagcacgctgagtggcagcagtcaacgaggggtcatgctcttgcaggctgtcgaaaagaagctgctcatgtgtggacagttgattccattggcctagcttcatatcagagctaaggttatcactgtcaatcgacattccttgagggaccatctcattggcggaggccgcaatcatcgacagctgtgactggcgcgcattagaggtagaatcaggcgacatggacgcatcaccgaggggcggagacatggatgcagggtgctcgcccgaagtgtgacttggaagggcaggtatactaggagcgttggacgattggggagttcctgcaaattgttagtggtcaaaggcgtgcaacaatgaacgaaagaaaaacataccctcggcatttgctgtaccgtccatcttggggtcagacccttgcgagtgaccttggaatccctccgcttcaagcgcaggatcaacaatcacggtcttgcctccagctgtcacagactgggtgtatccaggtccgcgcttggtcacgtctgaggcgccgacctgtcgcgaggcttcggccaacacgttgagaccgtcgaagttctgtcggttcggaaatccaccttcggcagacttgcttttacctccagcaggggaatctttattcgagtcaccgtcggtcaagtcggggagttcgtggagtcgcaacaacacgcgttggcggtcgcgtaggggaatcgcctgacattttttcaccagatggttggtaaggctgtcaatgcgacccttggggaacacttctccgcaggctttgcacgtatgctggtagcgattgctcgcgtcttccagcttgggacctcggtggaagaactcgaggatgagttggttgggtttgcgacccattgtgagggatggccgtggacgtgtttttggaaggttttcacgtgtcgtttagcggtatagtgacagtgaacagtcggccagagcaatcgacgtgtcgctcgttcagactaggcagtgtatcccgccaagctgataggtctgtggactcggattagaaatggggaatgtgggatgtgggaggaaaatcacacacacagtcacaaggactgcaaggcccaggctgtgaacctcagataggaccagtagcctcagaagagactcgaaatggaatttagaaaaacgaatctcgagatgatcgagtcgatgatgtgcgggcaaaaccagggcagtagagggcggtctgggaatcgcaaggggaggaacacgcgatggaagcttcaccgcacgaaaggcggtgatgtcttcaaggcggtaggagaaaggcggtgatgaaagaagaataaggatatctcgatatcaacttggataggagacgagggaaaggatgagttgttacgggatggggttgaagaagagaagaggtgagaaatggagggagaggatttattagtcactttgtgccactgtgactgccactccctctctctgaatctctctctctccttctgtatggaaactctatatatggggagttatgcaagctgtatcatttctttttctttttttctttttttaaggggttgataatatgtgtctacttgatacctagcaatacaaatgactggcatacatactacgcctacatgttggaaaacagccaatctaagaatatcgtcattcccgtgcctatatttcggtgcttccccccggggccccaaacctcaatttcccccttttgtgtatggccaatactaacaacactcagaactgatactctcatgaacctatggatggaaccttcatgctcatcaacaaatacggtgctcgggaggccgccagggcacacccaacagagcaaagatccgacgttcgttccggccctcaagcagccgacccccattcagtttcacttgctggttccgaagcacatcggtataaaggcccttttggttcaagcacatgcctttcttgcgtgccagcagtctcatactgcggttgaatatatcattccccgtaaagtatatcaacgccgctccgatctccgcatcaggaacgaacaataaatcgatccgacgccacagggtggtgccaggtagggctgatgcaccgtgccatttagatccatcctgatgcgacgagatggcaaggctagcctgcagaaagccactactgaacaatctaggtacaacaagaccgagcatcgtaatgcggatttgctcaagcgaggcaccaggtttggtgatcagacagtccacgtccccgcaggtgagtgccccccggcggtaagagcccgagacgatcacctgcatatccctatccacagcctgcaccgcctttcgcacgatcgccccgtgggcttcaacctccttgcgggggattcgttgcgcgaagtcgctgtggcgttccaccccaatacgctgctgtttagtcaatggagctctttccaataaatccttcagagacctgtagccctgtgcgacccatttggaggcctggggaaggccagcaccatagacgccgagaaattctttgattatcaggtcttctggggtattattggtgttctcgagacgacgaaggcggttagtcatgacaatttcttcgattttgtcagccaaccgctctccgataccagggatggcccgagcctgtgttcgcgtaacaatcttgtttggttgctttcgcaaagcgctgatggctttgcgataggccataacccgccactggtctgcagtctgggtgtagtattccagcatttgctcaagtacctcaatggttctgctgtttgggacgtcaagcttcgtgtccggatcgaacttctgcatacaggcgaaaccttttgtccagtcggattttcctttgcccttgccttctccggtggatgtttttggtgttttccaacttgactcctcccctgagctcgaggtttcgttatcggaagcaccagcagattcgtcaacgggaaattcgactggatccagaggctggttgtaaagatcagttctgtgaactttcgccgacggggaagtagttttaccaaatgacttgtggccttagcctcgtctattatatcatccagtgcatctcgctcccgacttcctcttttacaagcttcttcggctgcaggttcatggaccggttcagagatcatattattgggcacactttccggtacaatttctggtaagtcttttggcaaggagtttggcgtcggtttcttgactggcgataagcaacgttccggagactggtttttctcccgccgcgatggtttcaatggaagagaatcaggaagtggtggttccacaactggagacttctgcttctcggcagtcgttggagttccgttgggacgaaatcgaaggtgcgaggtatcaagaacggaacgaaactggatacattcggatggatatgattcattgacaagagcgacattcgtctacagcggttaatattaaagtctgggtatctcgtgaatgaacctactggcaaggattcaagtttgaggtagttaaggagatcggtcaataacaagttcttgtccataatcacatgagtgacatcggtagcccaattttgactccatcgtgcaccataatcctgcgctcgttgaatgcgcaatcgtcggaatggagatacatcgttgtttgggaagaagactggtattgagagttcagtgagagtaggctgtgggatatctagactacttacaaaagaccaatcccttgaagatctgctggtcaactgggattatcttagcattattggtctttcttttcttttgaggaggccctgcgctcttgatagcaggcatagttccagctgtccgagggcggttcgtaggggcaggcttagcgacagcgaacggactgcctctcttgctttgaaggtcacacgaagatatagggtccgaatttgctcgaatacgctccgcgaaaggagcgactttgtttggattgggtttgtcgagtcctttgtctgcagaagttagaagattcccccagctatcatcctcttcatcttgatcatctgagtcatccagccgatcaagagccgtaaaaaagctctttttagttggaaataggtccttcatagtaggctagtccggattccaatggaggggcggctgcctacgccaggggtggttcattatataggctagacctcgggggtcactgttaccgcacatccatggatgactcgagagcaatggaagcgtaatggtccgaaaacttccttgggccactcggacccgtggatgcgagacgcgattgactggcgcgaaatgggcgccaagtcacgtggcctaatttagatattcacagagtgacctataacgaggaatatcgaatccgtttggaaatagcccccttgggtagacctaggtggtaccataagttatcattctaaacatgtatttcacgatctattacctcccaataatagaactagcatcgacgactattcccaaattggaaatattatgtcatgtgactcttgatttccatggaagatcaaatgcgcggacaagttcgaaagcaataacctcacaatccaccaccctacacacggcccgttgactgatagaccgtgagccaatatgtggaaatccgccctccccacatttgtggccgacctttccctcctgcagactggccgctgtctaagctgccaattccgcaacccagcaactctctcccagctacggaccaaacccttttctctgcgccaatattccagcaagcccgagaaaccaatcgacacaaaagaccccgctcctgtgaaacgaaacataagaaatgaggcacaccgcctatcgactgccatcgaattcaaacagaaccagtcccaggatggacctcagcctggcgacgcagactttgttcctccaagcctagatcggcccatcggtagcccgcaagcacccttagaaggacagaatacaggtattgacacgcggtccttgcgccagcggcgcgacgacttcaccaactatgaccggcacatcaagcggcgcaaggaattgtacgattttgcctttcccccttctcttcttaacaccccgggatatagcccaaatccggaaatagtagggctgataaacaattgcaactcataggacaaagcaagtcgccaagccgtatttccgcgaatggtccaatctccgcttcgccgagggcaagacctttgtctcgaacccgcggctcttcaaagccgacagagccctttacttcccgaacatgcgcggcgtaactttggcaacgcccaaggacccccaggacaccacgacgcagctgcgcggcagcatctctgttgtaaacttgttctcgagcgtgtgggctgagagccaggttgcgacgtttacagggccagagcagaacccggcacttgtggaggcgatggccagcggaggaaaaatggtgcagaggattgatatcaatctcgaggagaaccggttgaaggcgtttctggtgaagatgttcatgtggcggatgcggcagaaattgcccaagcagcagcattcgcgctacttccttgtgcagaagggtttcgttcaggcactcaaggagaccattggcatgatgaattctaaggtcggctatgtttacctggttgattcggagtgtcgcattcgctgggcggggagtggaccggctgaaaagtctgagttggagggactcaatgctggtgtgcggaagcttattgaggagaagaaggatgttctccgggttcaggatccatctcgcaagtattgattaaggttgtgatgagaaggattacctgaactggagcctttgatgtgatttcattccgctctcggttggatttgtacatacaatagagaaactgtataatagaaagtataaataggcgccttcgagaccctttcacgagaattatcatcgattctgtcgcatcccccatcaagggggactcggaacatgcctaaacccaaacgccttcgagaaatccactcgctagagagcagcaatcgacataagaacaataagacatagggacggcggtgtcactgagctaccgccggagcctcgactccatactttaccggaagaacagcaacatcaaaaagcagaacccaatgaagcatccgaggataatagcatcccgcctcttcttgtttccaatcttgccgatgagatagttcataccggggacactgccagcagctccgacaatacgccgattaatgttggcaatagtctcgctctggacaccgaagttctcattgatggcatacgcctggctcagcacgccgtccatcatactgtggctgttctcgactcggccccgctcttcaagcatgtactcggcctcggcagcggcggggttggatgcgcgataggagctgatgtctgaacggacgttagagagtaggtttgcgcggtcacgcgattcagaaatagctgcggtcagacgttgaagctcgcggcggtggtcttggagtatttcgcggtggcgggagacattgttctgtttaagggcggaggcagtgagggtggcttcggagtcgagtagacgggatagttgggcgataacagcctcgcgctgtacggtcaattagttgtcggtgcttttctctctgttacatgtcggtgaatggacgtactctttcgaggaggtctttcaattgcgattcaagccgcagctcctcctccgtgggtgacggcggaggtttggttatggatgcaaattgtgaataggtgtggaaaaggttctcggtctatcgttgcatcagttaatattcgtatagggctcctgatgaggagatattggtacctgagtttcaagcgaccgtgcttgttgccggagctgtgtccaacctgagctagttgaggatgccatggtaggcaaggaatatgtatagtttggatatgaagtcaccggagagatctgatatgtttaagagtttctttcagaccaactagtcaacgtgcaagggccgaggtgctagttaactagttacctgcttgtctatgtacgtaagtgcccatgacggggtaaagtgcgctaaccaaatacagtaattctctgccccggatcccaggcaccttccgccagaaacttcaggcctcaaattcaggctttagtgccaccgtaatcacgtgcacccgctaaagtcacaaattcgcttagccctagtcccacaaccagtcgcaaattgaccctcggacatcttcaattctcaacgtcgacaacccacacaattcaacgccaccatggtatgtcgtgctgtgctacggctctgatatcaaaatgctgatgaatcgctctttttttgcagtcgtccaaggtcaaggctggtcagctctggggcaagaacaaggatgagctcgccacacagctcgaggagttgaagttggagcttaaccagctccgcgttcagaagatctcttccggcgcttcctccaagactcagagaatgtgcgtattcgacaccccccgatatttcattttttgtgcggatgggatttgaagatctgcgggatgggaacgatcgagaacccgggccagacaacgtgcaagaagattacgccaacattcaaccaagggatcaacgaggaagaggtggattacacgatctggcagaccgcgcacgatactggggccatcgatattcgagatttgatactgacggaaatttttttttctagcggcgaggttcgcaagtcgatcgctcgtgttctcactgtcatcaacgccaaccagcgcgctcagctgcgtctgttctacaagaacaagaagtacctcccgctcgacctccgccccaagctcactcgcgagatccgccgccgtctcaccaagcacgagcgtacccagaccaccgacaagctccgcaagcgtgccatccacttcccccagcggaagtacgctgttaaggtatgatactccgacaatccagcgcaggaacaggcggaatgagggttcatagatgttcatctttgccctcgccaccaaggacctcacccgtcagacgaaccgaagcaaccgagcacaatgctgacgatctatttcctgcaggcttaaacgcagaacttgttcggatatggagttttgtgggaagacgttgctggccttggacataagcaggacgtgacagttggatccgaaagcttatggaggggtcggttttctctttttttttacatccaaaaaatggaatttgattatgtatctaaataggatgcaaatcgactcttgacatgacatgattttagacattctccaagcttccttactcttgctcgcatgtaagaccagtgacgatatctcacggagatgcatagtctcaggactcggtgatatatatttctacaatatacaagttttgtgtggtccgcatttctaatctacatggcttgagtacaaagcaaacataactgtcggattaaagatatcttgctttggtcacaagggaatctaatgcgagacatccaaataccaccccaagtctacctaagattaatataaaaatgtttgaaaaccaatatatcctcacatcctaaaatagctaacccgacattaccctcggtcaaagctagaatgcgagccatagtatccaatctcagcctcgacgttccaagtctaggtaatccggttgccattgccatttgcactcgcagtaccaatccccagaaccccagtatctgtctcaagaacccacatgcccccgcaaagacaagaccgcaacagccccagcttagcaatcatcttgaacgacagaagcgaccggggcagattcgtatcaccagagacttcacagcaacgcgcacaccggcgtttctttaccggcgccacgcgaccatcattccccaacggcaacggcgggcgcagcgggcacttcttgaggatatcgacctcacggtgcctccggtacagcgccgtgcgtcggtcatttccaaaaccaagccagctatagtccccgaggtagatcgccatgcggttgatctcggatttgagcgccgggactgtctgtcggaggagggtggccacggcagtagtgaggactggcgggatgcgcgcattaaccagcaattccttttccgggccgggtctttcggcatcgccgaagccagcgccttggtaggcgtgcttcacggctgagtccactcctgccaggaacttctcatacacgtcgattcgtaccggcgatgattctagtgtttggcagatctctgtgtagtagattcgggagtcgcctagaagagaggcggggtttgcgctagcgaaaccagcgtgcacgccgcggaggccacggcagatgaagcggaggaaggcgcgcgacatgcttgagaggaggattaggagggggagagaggaagagtttttcactgtaaaagggtgagcgaagctggagttggttattaagaggttccttacacttctgtgtgaatgcttctgaatcatcgaatacatcttcgaattcgtcggccatgtcgaagatttcgctcagaagaaaatgagagaagtctagtgtccatttggtgttacccaataccatgcgtagaacgtcttttgtttcaattagcaacggataacgataaaatgggctttctttgaactcacctggatcatgcgattctgtctggcctcccttattatactggaagaaatatgcgaatagaactgaggcatgtctgagttgaaggcttgcccatggcacggccgatgagaggttgcggcgcttgagtctccctttgaagcccagtccggcctgtaagctgagacaacgaggtatgtacggatggctcatgagtttgtcctgttcggctgtaaagttgcaattgactggcagtgcacggtacacctcgctgatgaatgtggtttgagcctctttgggagttgtcagtggatttgatattatcaatacgaaggttttcaaagcactcacctagtgatagctgcccaagagcaaccatgagtatgtcatctgtattataatcaacgccacatcctcgactgaatgccaatgtcaaagccgcaatggccgcggaaagattgtctgcatgcctcggtcagtatttttatttcataaaagtgacctgataggccatctggaagatacatactctcgtcatagagaccctccgtggatccaaatgaatgctccatcgccctcagttgcatatgtccgtcactatccagcgtgacggcaacgcaagcattaggagagaaagcaatgtgaagacctgtccatgtcagttctagccacgccactatcgtttagtttcgtacctgatgtttcgagcgggtactggaacccagcctgggccagacaggtcactgcgcttgaatcgtcaagaccgttcagaacggccattgtccgtgtgtcgtagcaagttattgagctgtcatcatgactgacagccaagactgtcccatgctctactaaatcgaccgagacaatgtacttatcgcaataaacattctccagcctccgcagttccattttgggctgaggataggtcagtatcgattccacgcaacagtcaaatatcgaggaatgcacacctttgcttgagcgttgctcttttttgacgtcacttcgtcaaacttgggatggaggatctgcggggcagattccaaatgccacctgacaatcacactcggtgggccttgctggtctggataatcatgcatggcgtggagaggcttcgataagacagccaggatccaagggttagcagtggaccccgcgaggctatcaaactgtcccggcatgatctctagtcgtgtcaacgagtataccgagttcaaaaacggcaaagactgatcgtgatggtccgggccccggttaacgttcaatatattgttaggcatgtcgactttacagtggatcaaacggaaggtggggatagggaattggccaggcagttttccctgtgccggctcccattgtggcgggttccagctgatgtgcactctataaagacacattttctggcatgcggagtaggtggagagaaggatcccagttgttttgatgtgtcagtgatggcaggaaatggagctccgactgaaagacaataccttgtgttgcggtcatggatgcatgcgttaatagtctatccgagtaccctgtgttcttcagttcggctggcagctcggcccatttgctgtcggggttttgatatatcagcttgatctggccggctctggtcacacatatcagtgcgcctttgttggctgggtggaatggcccgacggggcgtcgacggaaaggcgaatatgcccatcggccattcaccttggctgcttgatgaaatgcatgcacctatattaccagttagagtcctttcactcttatcttgatatatcgatggataatacaaggggactcaacgtacataacgctgggagttcagccacatcatcccaacaacctggctgccatcatcgccggagtcaaatgaggcttgacgcaagcctgtgatgctgttcagtgcaattgaaatggaatagattgatacccgaccggaacagtcgacaacggccagttctgagcctgtttcattccatgatagatgggccagttgagtgccattatgggcctccaagactggagccaaagatgactcttccccgagcacccatttgccatctgatgggcggcattggagatagcggataataacccggattccgtctggggaaatagatgcaatacatcccatccgagaccaggcgattttcctagcagatggttagtgctggaatttggatgtgcaacatttttccaagcttactggcagcaccctgatagacgcatttcatctaagcattgtgctagacctttgattggggaggcggtcggcaagcccagctccagggagttgggttctccaaagagatcatccacatcgataccgtcctccatgatcaagggcatgatattatcggaccacttgtcaaatgtgtttgatgatcagggaatcaatagagcagcatagcttcatagagttcctcgcaccaatgaatatcagagatgggctttattattatttggtcaaagggggagtggattcccgagatcggcacccaatgttcgagaagatatcccaaacaccaacaaagatgtcaccgtcaatgcagcaattcccgatgtcaatatgagggggaccatagaccaaatccagatgttcctatgccgtcagcgcctggacctccagggaccaacccagtgatctgcttagtcagacctcgtgacacggatcaggtgacgggtagccctgccaacgaccgctgaccaatcagggggaatataaggtgacccactatttagcagagcgaatcactgccggtcccttgaactgtcaaaacatggaaaacagaaaaagagtggcaggaaaaatagaaagaaaatagccaaaaataagagaataatcggagaagcacaatcggaagtatcaagcgccggattagggcgtgaaagcgcaattgactactataaaccccctacaaagtacgatcaacggggcttcaatggcatcggggcatcaaagactctctcgcgctggactacggagtaattccctctggatttccgaagtatacagcgtagcaaccttgaagtcttaaacccacagccgttcgcatcaaaataacgtcgagtcccgcccttcccggttcggttcgctcaaatcaatttgctcctcagctcaacattcctaaatccattcggccaaaacaaagactgtttttttatctgtggcccgctcttttttctattctgtttttctccggcccatagagccctgaagcgcacgagtttcattaatgttcccccccccctaacgctgacctcatcgtcaacttccttcagagctacaactttcgacctacaactattcctactcttttctaccctctcttctatctatctcgaggtcttacgcgtcattgattcttgattgatctttattccgcatacattcatgattcctcttttcgaggttttctacggtctgtgagcaatttggaggtaccactcggtccttttcgccccgattccccctgggggtgaacattctcctacgccgtgacacctttcaacccattcgcaactcccacgcagccatgggggatctcaatttggatttctcatccgattcggagttgagctccgtgccgtcatcaccaacattagcagcgcagtcatcacccgagccagcagagcggtacccaacgccttcatcccaagtgggagctgagtctgctgagggttctgcgcgccaagcccgtcccgcaaagaggagacgaaaccccctaccaaaggaacgaactactcaatatctcgatctatctgaacctctctatgaacaaaatgcccaacactatttgctagttcaaactctgcgtcatcaaaaagacattgtcgtcatcgctggcgctggaatttccacggccgcgggtagtaagtttctgctctaaggattctgccatgtttgagccgacactcataactctgatagttccggacttccgctccacagatgggctcttcaaatcattgcagaaaaagcacaatctaaaagcttccggcaagcttcttttcgatgctgccgtctaccaggatgacgcattgacggcgcccttccacgaaatggtccggtcgctgtcggcggaggttgctaatattaagcccaccgccttccaccaaatgcttgcccgattaggtatcgagtctcgcctgaagcgactttacacccaaaatatcgatgggattgaaacctctatgcagccactggcgactgaggtcccacttaacgtcaagggcagttggccagtcactattcaactgcacggcagtattgagaagatggtatgccagaagtgttgctacctcgacaacttcaaccccgacatgttcatgaaagccgacccgcccgcttgcacagaatgtattgagaccgacgaagcccgccaaatcggcggtcaccgaagccacggaattggccgcatgcgcccgcgcatcgtgctctacaatgagcacaatcctgacgaagaggcaatcacctccgtgatgaacgccgatatcaagtcccgtcctcgtgtcctaattgtcgccgggaccagcttgaagattcccggagtccgtcgactcgtcaagagcttgtgcacgatgatccgcagtcgcaaggatggtgtcacgatgttcatcaacaacgaaccaccaagcggcaaagaattcgataactgctttgacttgatcgtcaaggggtcatgtgatgaagttgcacatgaagttaacctcaagtcatgggagtcagaggacactaccccatacgtgtacgaatccacgcccgagcccattcttcgtccctcaaattccacgggcatttctgtcgtagtcacaccgaaaaagagacctcgtgcagacactggtctcgccacgccttcttccagccacgacgagaagcccacgaaaaagccagtcaccaaagcttcgaaaatcaagatccaaaacccagcaagcagtggccggtccatcaaagatattatcaagaaagaaaagcctgctgctcgcaagcctacctccaagttcatcaccaagcccgcccccaatcctcgacccaaaaaggccgcaacagccgccgcctcgaaaaagagtgccatacccgccgttccggtcaagaaaatcgcctcgttcggccgtgttaccaaaacctctcaatatgctggcaagctcgttgcaaaggccgacggcaaacctatgcaaccggtctcagcgggcgcctcgaggaacaacggtcctctgccaacaacagagcagcccgagaaggcagacatgctcgatacagagtctcttcctcggccagtggcttcctcttgactattctatgttctagatcctgtactgatcttctattctatgttggctgcaagttcatgacatgatgcatggttaccgaatggcgtccttggtgttatttcccttcattgtctttccggtgccttccccttatccccttctgggatttccgtttcttcacttatgtttacatacttctcttcgtggactgtattcctacttgcatcacctgcgtttgctttaggttgatgattgctgctgtcctcttttcgaaagataccaattgatagaccacggtttctcgcatgggttggctcgggcgtttttgggacgaagctggcttgttccagcgtgatggggtttccttgttctatttctttttccttattcttaccttcgctcatgccaatctgcatgggtgtttcatgttggattatctaaatgagatctctacttgagttccacctacacattttgtcaggtgctgtcttgtttaatactctttccttgttctactaggaaacaagatggtttcttttcctttgttttgtgtctgtaatctttagtgtagtagggcattgggggttgatataaacatcaactcctggctgcgcaactgtaatgtacgtgacatgtcgaggattgttatactatattctggacttcatcaaagtttaccatcttcgactgtatccaagtagatatcaacagagtgcagcataaaatccattcgtcattatgtgtatagtacagcagaaaacatccttttcatttgccagtcagtctctcccaatgccgtccagagtgagttgtctttggctcattcacatagacatggcctggatagttagcccaacccaagatcatcccgtaactgactaccaggcccatcctcatcttcatccgtctcctcggcatcaggatcataaggccccctcctcgcaccaggctcacggtccaaatcctccacatgctcaaggttatcctcacgcggcgtgcgatcttcctcctcttcctcctcctcagtctcatcctcttcttcctcttcctcttcaacatcttcctcttgagtctcatctccatcatctccagcagtcggaccaacagctttctccacactcacgccccgcttcacccttttcgcggggttatcaagcatatcgacatcagcatcggcctgggtcgcgccttcgcctaacgcatcctccgtggagccattctcatctgccttctttggcttgcgcttcccggcttttatttccatatatgcctccagttcctgttcgagcctgccgcggaaagagtcgagttccagctcggagagggcgttgaagacgtctgatggggcaatggtgcgtttgagggttgcatcgttggcgctaggaaagcgagggttagttcgacatatcataccatgggatagagtagagcaaatcgtgctttaccatccaacatatttgggactggaagcacgccaatggcagcggggtaagggtgaaacatactgtgaagacagataagaaacaaacaccgtagcagccttctgcatagccaatacagcgtccttctggatcgtcgtattcggcgggagaaccgacttggcgagacgaatcgtcagtgagcgtggtaggagatagtcctatggattaccggagatagcgttagcctggtctggttcctcccctgcccatgcgtatatgaagagcccatgggtatggtgacatcctttaatacgcaatgcatgttcatgttgtcttacctcgacacttgcgcccgcctcagcccgagccttcaactgctgctccgtcgcaaagacgggcttgtcggtgtgcgccactggagacgagtgctggagcagggaatcatcaggatcagcgggcgtcactgaggacgtggatttgcggggtggcatttttgtatgtttgaagcaggtaggtaggtgccttcgtggcggttggttcaagggatcggggggttgacgatctgggccccccttggatattgaatcgaatcaaggcctgattgtttctctgtgaaggtcttgagggttgtgtctaactttgggcggcagttaactataggctttgaagagataacgttcgagggttgcaaggaagacgcgccaacgcgttagatttctcgatgcgcgagtgtggggggcttggcggtgatgtctactctacttcgacattatttatatttctatattcacttctacaataatatttattacaatctacagttttggtggggtttatttgcaaggaattgattttactgatgtttttataccattgaaattgagatcaagcctagggaaggatggaatgccaacataaaacgcccactttttggtatccagaaagatagaatcaaatagataatgagttcataacacgagcaggaagagcggcccttactcgaccatctcatcgtcatcaccttttccattgccccagagaccctcgatgctgaactccttggcccactcggtgacaacctttgtggtgtcaacaccaggctcgatatcgccagcaggagcatctgccgaaaccacaggcagcacgggtgcagtggcccagccttgaatgcggccatctctccagtcgttgataacggtcatggcagcgctctcgatgttggggataccgtgctttccgagacggccgcgcttgcgtgccacttggaccaagaagtcggtagttttatcgccattgccagggaagagggcggtgatgccgtacaactcgagcatcttagcgagaaggttctccgatgaggataaacgcttcatcaagaggttgactgcgggaatgggatcctcgatctgcttgggcgggacagcgttgaggagaatcaaacgcgcctgatcctcttgcttcttgttcttcttgctagacttgtcggagctggggaagacgattccgggcgagtcaatcagcttgagtctgctgtccagcttgacctggcgcaggctagtggtgacaccagcctcggcgcctgtggggcatgcgttgcttgagcccttgttcagacgtgcggtgagtgcgttgatgacggacgacttgccgacattagggtatccaatgacaccgacggagatggctcgcttcaactgcttggcgccggcgtatgacttgagggcacggaagagtgtatccgaagtacccttgattgtcaactgcttgtggtcgaaggtgtgtgcgttggaagtggtgccgctggatgccttaagggggagagtggggaaggagcggcgcaggtgaagcaaccaagccttgagcaccggcggcggaaccagatcgatcttgttcaaaatgagaatcaatcgcttgttaccaccgtccgccatcatgatctcgcgctcaatatccttagagcgggtaccctccgggtcgcgggcatcgagcacgtatagcacgacatcggcgttgtcagtgacctgcttgaataccttgtcgaattggcgtcttgagctctcctttgagtaagactttgagttgaccaatggcggggcagattcgtcaatagttgcgccctcctcgaggtcttcatccatctcatcctcgtcctcgtcttcatcttcctccatgtcttcgtcgtcgctttggttgtcctcgtattctacggcacgggcgcgtgctgaggcgagaagagcagccatagggttcgaatcattgccctcggcatccatatcatcatccataatatcgttctcatcgatgtcgacagccgcggtgccagtcgcgggcaggtcttcagtcttgcgggtttgtgctgcctctcgaatacgtttttgctcctcggccttcatgcgctttcgctcttcaatgtcatggagaagcttgtccttgccggggaagagattaggaatgccggggtccttcttaagttttgaccgccattcagggttctgcaaagaacatagtcagaaacttcgatcagaaccatcacgcggatattgtctgtagtaccttctttgcgagcttcttttgctttctcgccttctgaacagcagacttttcaatcttatgcctcaggcggacgggaacccgcttggaagtcttgcctgtagaccgttagaattgcgcctcagaaccgcatgagcgagaggtgaaagagtatcataccaaagccgctcttagtaaccattttcaatgcacgtatttgttgatcgcaaagaaaagtgcacagcaaaccctcaaagtctgtccgtaacgggagtagaaaaagttgagtgccaagatttcccagccgataagcggattattagttgggccgatctccgataattttcaaatgacgatgactaagcatgcgggacagttgctaaattaggtacatacccgactcagtggaggcatcggggataagcaagaaatatattatttgatgacaccttatcctccattatcctcccttggaattctggttcctcttactgttgatatttaacacaaaattatcaacaggctgcttcttgtttttcacaaaatcggcttctctttctactcactattgactccgcgcgcattcaagtctccccgcatcccccaccatgtcctcagcaacaggaacgttctctgcgcctgcgcaagtccacacattcgatggtcttctttctgacttcgatggcacaattgtggactcgactgatggtattcgatccctattcaagtcctcctaagatcaattggaaccaatactgattatccggtactgaatagccattgtgaagcactggcacaagtgagtcataaacacccaacatgaccgccgcgcaaactatctaacatgaattccgcttcagatttggcaacgatctcggcgtcgaccccaagattatcctcgcgacctcgcatggccgccgcagcatcgacgtaatgggtatatacgacccaaccaaggccaactgggactgtacgtatattggattctaaacccccaaaccgatcgctatcttccgatataagcaaaggatataaactgacaatatttcctcgccacagatatcaatgaagtcgaaggccgcatcccgaaggaatatggctccgacgccgtcgagatccctggtggccgcgacctcctagcagccctcgagacctccggcgcaagatggggtgttgtaacatctggcacgcgccctctagtccacggctggctggaagtgctcggcctcccgcaccccaagaacctggtgacagcaatggatgtgccgctcggcaagccggacccacgctgctacctgctaggtcgggagcagcttgagatcgaacattcaacatctattgtcgtacttgaggatgcaccgtctggtatcctggctggtaaggctgcagggttcaaagtgattgcgttgaagacgacgcattcgctggagcagctccaggaggctggcgcagattggattgtggaggatttgaggagcatttcggtcaagggggttgttgatggccaggtgcagatcgagatcaagaatgcgtatcaataggtggttgttgccatctcagttgcgccgattcgctgctgcatgggcagggatgtgctctttcatccacagctgcgtgacgagtttctttggggttggatgcacagcctaggcgtctcatggtaaagatgtcatgactttttatagaattaacgtgcactacatacacgttggattgttagatatatattcaaattttctagactttttttatcaaaccaagatttgtcttattagcgcagcagtcagttttgtcttgctagaggacttatacactagcaaatgaccacaatttgttcgtattcttctgaaaaacgaggatcacagttggtggtgttgaaaaacgatacctatactagagaggcaacccggattccagctgctgtctcagaccatgtaactggccaattgggcttttgagtaggaccgaatgctccccgaccacaagaactaggctctacatatcccgaaacggtacaaagataagaggtcccgaagtagctcaggtggttccccggccggggatgtaatcgggccaggcaaggtgcaaatgcaagatagaatgtactatgcacgagttccacatacaacccaccatgtgtaggtagttagaagcaggtatggagctcactctagcctcgcacacgaatcagcggtgctatcgccgttgcaataagtacggacgcatttaatgacagcagacatgtctcataacaaggatggcggctagtctagatgattcgaccggcaaggatcaaaccgtatagctgttgacatggtaactggacgccctagactaccatggcgtggcggacacctttcgtggttatgcagctacgcaatccttgcagctcgaagccggatttcttcagcagggcgttgcagcatgcaaatgtacctgctactcccgtctgatccaatcaatcaggcagggcgagccgcaaactaccgttcatgtacgcttgagccctcgatggatgtggaaccaggccatgagcgcggaagtgcatccccgaggggaatgacttcaggattgggaaaacaataccagatctgcttttattggagctgggcgttctggctgcagccatagagggttcagcagctgcacctagctctttcggggaaaggattagatgctcacgaggatatgactgcttttcctcccggcaactttggaacaaaatcattgtgtgaatgccattggtgggccaattggttctggggtggacacatcctacctgactgggggagcttggagcgagagccaactctctccaatggtgtcgaggaagcccactcggccggtgagaacagcatgcaaggggcctaggtcattccgctcatgggtcgggaagaggtgatgttcgaatgcagacctggatatcatcacaattaaccgaaccaagaaaggcgatatgggagagcagtctcgctctaaatttgagggattccttgtccatgaccctattacattgaactctgtatgaggatgtgtgatgacgcatgaggggcatgcaatctcatcacatacagcagatttgtcctaattcagatctggactatagccttgggatgcaccgggttggggggcgtgtccaatcatggtgcagaccgttcctcttgtggctagtttttgtagattattctgcttattctgcgagctcgagcactggtcccccgaaactgacaaatacataatgccaaggttatagttatgcagggcgctcgatatagttgcgcaccgccacaggcatttggtcagcgccacaagggattctcgaggacggatctatcacattgacagatctgcacggctgagccacctggcttctggcaaccgaaatactccgagcccctaaaatatcgtggttgacgagtcgagaaaagcactaagccatgcgccgccatggataggggtttgatatcataatcggagggtggaggacggtccgacctcggccccaattgaccgtcaatctatgaaggtttgagaccgaggaatatttcattttgctatcccactgtcgatcacatcaatttttcccggagaattgtgtcccattgtcttcaattttgcacactcgggcagtgtgtggttgttgttgcaagcccgatatttgagattgtgatttcggtgatgggaggggatccgtgcgggaacttggaaatacgttacggatcgatccaggggtcccgaggtcgtcatggtagatcccccgaacttttactacgaagtcgatctctgtgcaacattgctgaaatagcctaaatatgtactcaagtacgagaatggggcttgttatacggagtacttggaactccgtactccatatgttactgcattaaaggcgtagagaacatcagagatcggggcctctcggccaggctagagtaatatcaaactggtccatctctacgctgctcggattcgtctatgatgtagtgtactccccatgaactcggaccatgagaccatttcgtgagtgggttggtggggcatgatgtgccaaggcgaaagtgagcacaatcgcccaaaggaaggggtcgtgaagctgtcgggagtatcatcgggtgtgatgtgcgccgatacgcgccttcatgcacagaagcgtggacgggaacccgatttataagtttctacatcgtcacaagcacgtccatcgcagaattactgctgaagagccatagccaggtatcgatacaaagtttgaggggatcgaaaagccacgttgtgtacggatactctcgtatgatctacccactccgtggagctgctagtaccgtctcaaacaaggtctttgctctggatttttctccggagcgatacctcggtgtcaatcactccaccatagtcttctaatctatgactggctgaccgagcatgatcaacctaggatcactatagcgttggggtattttgggtcagatcatgctaccagatagagcagtcaaaaggtagatcactaaatcgaggaggggtgctcttgtggcttacagctagagcagaggttccgctaggccggttcattgttgccttattctctggtgctactatccatgtgtcgacgaggtcatagttcgggttcgctatacggtaggaggacaggcgttcggggatctctcgactccatagtttgagattcgtcgcccagggatctcgagtgtttgactgtcaattgttctgaacagctgaggtgaaagattctgagatgccccatggtagagtactatctacaatgtcctccgtataatggaactgcctacttaccaaaccaaacgtagaatgaaacaaagttgagacgaaaggttaccatagcgtcaaggacagcccagcagttaccggatgttcgggcagtgatcatctttaggcgcatgtgcatgttaagggggtggacaaagttggggctgcaatcctcgtgacttgcgtgcatagaacgtcttattccagacgtttagcgcttgtacaacatagagcagctccaaccagaatcccgggaaaaggcaagatggtgtcacatacgtcgaatatggttggagcctggaaaaagccgaataacagggggcacaagatatgtgctcagagagggggcgccacatccaaagaaagagataaagaaaaaaagctcggcagatccttgagtgatcgacgggggatctgtcgactattgatgtttagtttgtcttggctgactgccatgctcccgcactaggatggattggtgctagtggaaagggggagactgtcagttacagatagctgacacctggttgcttcaggagtcactagtctacggagtcactattatacaatgtgcctttgtagatagagtagacatcatcatcatcgctctccatgatcgtgacgatcctcgaatcaaacaaccgtattgtatcggggacctgcccgatcgtctgacccagagcaccggtctccattcaccccggtacgagggaacgcctaggactcgaccgggatgtttagggaggaaatgtgactgttacctaaagcagattgattagttatgcaagtccgatcacccacgggtacggaattccgtaccgatgtctagttacaacttgacgacgtcttacgtgtaactactccgtagggctatgaacatacagcattgtactcctacggcattatcgcacgtaattcggtacttactagcagatccactggtgtttctttccaaattaaattcttctatagtggacatgattttctttgcagcgacgggcacctcctgggatcggacatgacgctaatgcaggaactgggattttttgcgtttgtgtttttttggtttgtggaattcgcgggacacgaaatggtggtcctcaagccgtgaagagatcttacaggaggtgtatcccgtcgtatatcggtattttaaatcctataaaataccgcgggaggcatccgacccaaactcggctctccgcatctgaaccctggctcacctttgtttaatccgaagcttactagtataaggtacactaggtacatagttataggtaattccggtgctgtggcaggtatggaatagaaacaacgattcatacgagatcggactctatggcgcctcgtatgctatgctatttttcagtcacacgtccatgttgaaataggttcacgaggggggagtctggacgggatcggaattatgttatgggccaactctattctggaaacagaccaaaataaaaaaaataaaaggataaaggatacatcgtagagaataagaataaaatccaggatattaaaaaatcaaatccaaatgtgactctgatgcagtcaggccgccaccccctaccgagcgggcggtagcgcgactccacgggctaaaaaaggatgaaatacggtgggggtggtaattcggctttcaattcgtggatggttggagaagcagacgatccccgatctgaattgcttttcattgcgattccttttccaggatttattcgaatttgtatttaaaatcttatttcgatataattgagaatataatttcgatttgctatactcgatccaagtataggtacccgccccccgggtactgatagcacacaagtctcatgtacccagtacaggcacagacctttgcaaggctgtttcatctgattccccgttactgaacaatacccacccaccacccaatcataccacactgttcggcagctctgtacggcgctttaccagccgtcacccccgatcttcccagcgcctcatctttctttctcttcatccttttccttcccagtctttcctttacgtgactttttttgctttttttgctttctttttccatacacactcttttgggtccctaattcccgagtctctccttaatatcgactattatcacaagctaccgctgctcatttctttttcttgacggactacccgtactgccactctttacatttacaatcaaggtccctgccgttcccatcagaggttgaaccaacccgaatctacttcatgatatagacctcgttcctcgaacctgccactctcttgtgcagccccattcccgtctctatctctcttgcgcccccacggcttcttctcccctatacttgcccactctttgctcccgatcatcatgagctatattcacccctcatggaactaccagggtcaccagggtatcccaatggaccaacacatggcatacgacccgtccatggtccctccgccgatgatgcaccctatggatggctatatgtatcaccacccgccaatggagatgatcgactactaccaccaaccgattatggactacgacgaatataccgaaaatctgtcacgaccgcggttgaccaaggaacaagttgaaaccctagaggctcaattccaggctcatccgaaaccaagcagcaacgttaagcgtcaattggcggctcagacaaacttgagtctgcctcgcgttgcagtatgtgaaatagaggctataaccttccgatctacagagagctaatcgaatgaatagaactggtttcagaatcgtcgcgcaaaggccaagcaacagaaacgccaggaggaatttgaaaagatgacgaaggccaaggccgaggccgaggaggctgctcgccggaaatcagagaccttggaccaactgtcgggatcccgaaaaggatcaattgcgaaggaggagtcggagagatccgctactcctaagcaaacacctacctccacgtccagcggtcatgccaagacagattctacatccagccgttccaagcaccacaaaacaaagagcgagtcggcaagagaagcaactttcgcatctctgcagagggcgctgaatgctgcctgtgctgcccgggatcgattcggtcgccggattaacccccggagcaagaatgagtccgttcccgaagaagaagacgaagaagagacagtgtcccctggctcaatgccaccaccgaagacgaccactccagctagtgatcatgggaaccttgccaacataaacacttccttttcaggttggtctggtatcaaggaagaaccttcctggggatctggcgggcacaatgagaatatgggatacaacacagagcagacctcatattccgcttgccaccaatcaatggcagagatgtcaaatcacccccactctatgcatcagaacttggacgtctactcgaaccacctaacccctcacagggacgagtggtctcaggacagcaacccacgacacgaacaacttgtctacagcaacatgcaatatccaatgtccatgcaggcaccagatatctccgtcacacgtcgtgagtcttctgatgcgctgactgcctcactggagggcattggaatctgtaccggccaatctgggatgtctcaatccgtcgatcgagcagacgggatttggaaggaacccggcaaggagcttgatctcgccgcacgccgcaagcgccctcgtcccgctgccattggcacttcgggaactcgtcccttggccaactcgacctcgatgtcctcgctctcgcctaccgctcgtatgcctaatcacagtgctggcaactcgatgagacaatccaagtcaactcagagcctcaactcccggtatgcaggcgtgaggaaggcatcggctgcccagcgctctccactcaacttcacttttgcggattctggttctatcaagaaggccgagcagatgctgcgaccctcgctctcgaccactagcctagctccacccactcccttgactccgcaagacctccagaatttcatgcctgcctcccccgcggatagcaactactgcatgtcggcccactccacagcccacttcttccctacttctcaacccatgcaggtcaacatggcatcacctcctgctacgccaatggatatttactctcccttcccttatcaaaacgttgctccccctatgtcagctccggctcacgtctcttccttccccgagtatatcacatgtgactcgattcccatcccaccccgcagctgggccgacactgcttccatatcttcgcccgagtacccggctggtctccaggtgcattcaaccactgtctcgcccatgggctataacgcgaccaccgaccataccgggcaggcctttggaatggaatcggtctctggatctccgtctttgatctattcgattgaagataccgatatgccaggctctgcagagctcgcggagaggaagcggactgaattcatgatgcacgaattcccagagcacgatctccagtatggtggccatcacttgccatcgatgcagaagccgaaagcctacacgttcgcaaacaacacgacaccaagtaactacccttcctaagtgaaggttcattgatctttcccttaccatggatgtatgagcaatgcgcgacaacttttggtgtttttggtctactacaaaaatttctgccttcaccttcgttttcctacactttccctcggggagatgttgtatacccaaccctccgtgcgcgaagaagcactgtcactttatgtctcctatatactattttccttttcgtgtctctttatttggggtgtattcaccgggtttttacatatttggagcattccttgcatgttgtttattggcctaggagtgtttttgttattttggtgtctgataggaccttttaatttctgccgagcttcctcccgggaacttcgagacctcttttaccttctacctttgtctactcttttttattcctgttggaatcggttttgtggattggatttgaacttgggtttgcatatggctttggcagcatctggctttgatattttccacgatatatacacttgttatgtatctacactatctcatatttctcaatcaaatcaaaaaggggttgatctcttgcattttggcatttacccgaaataaacccgatcaaccagcagacggtcagggcttggctattaggccaagccatcggtgtcttgccctttttatattgtagctcgctcatccgagtactttgggatatactccgaaggtacactgatgtcgtacaataatggatccagcacgtgcgccagaccataggttgtggtgtccggaaccttggaacgcggaaaagcgcccctggaactcaccgtaaccttaactaccacgtgcgctacagtctctcaaggttcgtacctgtgtataaaaggagcatatttgtcgatcttatcccaagagccagaataaatttgtgtacatatttggacgttggaattgaaacccgtgtatctccgtccgatgagactatccaccctcggcacagcccttgtgggcctagctgccgcgcaggcatcaattatcaattactccgcggtcacaggctacttcctgcaagatgaggcttcgactgatgcctctacatttgactatgtaagtgaacaaataccggcgaattatagcagaaacaatctcttcgtcgacgccttattattcggtccgctgacatgttcagacagcggagaacttcggcctgatcgcccgctcatatcccgcagacaagaatcacaagaagcacgaatctctgacccaatgggaacgcttctaccgccaggtcactgcgttgaatgatcattcccccaaggacgtcgagtacaaggttctgttccttggtcgacatggcgaaggatggcacaatgccgccgagacctactacggaacgccagcgtggaacgtaagtccctacctatgaaccaccttaacgttacaccaggcccaatctcaccacctccattcagtgctactggtccgagctcagcggcaacagcacagcaagctgggcagacgccacactcacacccgacggcatctcgcaagcgctcaaagcaaacgagttctggcaaaaggagatcgatgaacaacgaatccacaccccagaccaatactacgtcagcccgctgacacgcaccctgcaaaccgccaatctaaccttcacgggcctggacctccccagacacagcgcgcccttcaagcctaccatcaaggagctcttgcgcgaagggatcagcatccacacctgcgaccaccgccgcagtcgcagctacatccacaagctattcccgcactggtccattgagcacgggttcagcgaggaggacgagctgtggaacggcgtgacggccgagtcgagcggcgcgcaggatatcaggagcgcccaggtcctaggtgaagtgttctccgcttcgcccaagtcgaagacgtttgtgtcgatcacgtcgcattcgggtgaaatcgcctcgattctgagggttattgggcaccggactttcaagctgaataccggtgctgttattcctgtgttggtcaaggctgagaaggttcgcggtaaggcgtcgactacctctgtgccttgggaggtgagtccgcattgtacggagccgccggttacgtcggttacggcttgtgtttgtccttccagtgcggtgcctgttacgacggctttggctactggattttagagtggctttcttggctgggttgggtgtgtctaatggttttgcttgtacagacccgatgtaccagcgaagcaatttgtgatggtatttgttacaaataacgggctgcttaggactccttccaatgttgacggcgtggttcgataatctggtccataggcttaagatggtacaaaggatacccaaacccgtatgtaatattcaagattcctttctctatagtatctttcggacaatctactttgagggccttaaataatatctttttgatctctttctattctcttgttgatattttagatgtcgccccctctcctctattcgtactgccgcttgtgcggtgaaaaaaaaggtgtaatatcacacacaacatgataggttagatgctaagcaaaaaaagacttttaacaaaaagaaacgtccccgggaaggcttgaacttccaacctcccgattaacagtcggacgcgctaaccaattgcgccacggagacttgattgtggcagaggtcaataggaatggcattatgagcatgttttaatgcaatcgattttatagagtgtgaacagatcatagctggtacttaattaccccccttactattgacctatgagtaacgtgtgagtaacgtataagtaacggctaagtaatgtttaagtaatttctaagtaacgtacaagtaactaacgtgcaagtaatgcgtaagtaacggctaagtaacgcgtaagtaaagtctagttgagcaaccaacgtctaagtaactaacctataagtaacgcgtaagtaacgtctagttaggcaacttctaagtaacgcctaagtaacgtctaagtaatgtataatagaggcttggaattttatgaggctccggaagcttcaaaggttctttctccacataactatgcgccttaccgtgattagtcatcttttagagtttttgacatacggtatagccctaggtcgctcgaaagtcgctatatatcatgctagtactatacctcccatactctttcgacgttgatatacttcaccactatatctcctcatcaccgcgcgtttatgatgtcgtttcccacaattgaaaggatggcagccatcacaaggctggtacatcagcacctttcttccctttcttccctttcaatctaccataacaagcttgtatccatcaaacaatccttgttttgtctctgtgaagcatctattgtgcacttgttgtgaattctgacacttgttatattgttcctatcttttcgggttcaattacagcaatggatccatctcaggctcaaagcctgcccgtgtcgcagctgtctgccgtgaccttgaccacgtcgccctcggattcactggctgtggtggccttaaacgggtcgcccactcagcagcctctaagtgatgctcctactgacatctacccttcgccgactcctcgtgatgacgcacagtctaatctgggacgagagtcatcgctcccacctgaaattttggaaatggtaagtaacccattgagccaagccaatgcagcctaggtctcttcggccagctaaccttgtctcagatcttttatgccgtacttgaaagtcctcccgcgtttgaggaatacgacttcatttatggggatgtcttcgacagcccggcgaccaaggaggctctttcgactttcagactggtgaaccgggcctggaacttcgttgcaactcctctccttttccgaaagatccaggccatgatcggatgctctactattcgaccccttgataaaatcctaatgatttctcaaagtccatacgctctttacgtacgcgacgtgcactttggtctcttgggaatatggctgcccggactgggttatgatcagtacatcgaggatctggcagaaggaattcttccgctcctgatgagtcgtttcaagaacgtccaaacattccggttgcaagcaccccccttggtagactcattcagcccattagcactgctcatgccggatatgcttgccaagctgacaaattcttttgtgcatactttgcgctttatacctgtcccgagactgagatgccttcatttgtctctgccaactacggcggaatttgctcgtttcttaacgacgtactcatactccaagagcttcgccgaaatttgtgccggaatcgaagagctacacatcatcatcaatgacagcaccggccttggtgtcagggcaaccccgagacgacctcgctcattaatcgaggccgggtttctaatcgggcaatttaccccgtatctcgtcctactcatctctcatgcaaaacggatccaagtcctcagcttgaatgcttatagctggcttgatctatccgatctgcaagcagggagtttctctcaacttagaagcctccggctcgaaggtgtgcaggtcaagcccgagactctccatcagattttcatagaagctcggaatacgctgcttcgcgttgaattgatcgatgttaagctcctggccggtacctggtctgaagtttttgatgttttccaatcttctcgattgcttcctccccctaacctcaactggcttcatatttctggatgtggctacgccatgaccggccaatacactactcgtggattctcggaagtccgacaagcactctggtccacccgtggccaggactggattggtcttatagcctggatggcgatgacgaataacaaccgtagtttccagggattgcctccatgtccgcattcttacttcccgactcccccagtcatcaccatcgactattagtcggatgcattgggagtcggatttacagaacaaagaggtcacaggggggggcatcatgatttgtaactgctgttctggtttctggtgtctgggcttactgccggtagacctcgcttggggttttcccttgctggggtgtctacccggtgagtaactgctgtccattcttctctgcctggttgtttcaatctccaggagaggtatgtaagattatttgtcgattctgcgtctggtcgtcttgacctccaggcgtagcaaatgtaatttacgatttctttttccttcctttttctggagtgattcttttcctttcctagtctgatttctgggtatgcggtatcgtagtatattgtaaaattgcgagaagctagtcaacctctgagttagttagtaaattagttagtcttgcacccatgcttgaataattagttggtgacttgtgctttgcggagtagcatgcctctacaccctttcacttgtgggcgcatctccccagtttcaatgtctgaagaaatttaggttttcatggtttcacgtcgtttcgtcttttcttcgtttttgcccttctcccttgtggctacgagaataatattgaaactcccaaccctgatcccttagctttggttcatatagcataaaagtcggtcgctcttcatcaaataagtctccgtggcgcaattggttagcgcgtccgactgttaatcgggaggttggaagttcaagccttcccggggacgtttgttttttgattttgaatcaaatccagttatctcatttgcaaggggacattcttgcttctgtcttgttttttagggttaattttttgggggttctagtcagatagggtgaggttggtttaaactcagtcgtcgaactttatttattgtactgctcaattgtatccatgggtgtatcgtacatacatagcccttctttatctagtgcatcatttatttggccgacaataaaacgagctatatgcagtccctagtatctcggtcatcttcgagaagtaggaggaactactacttgatgttagcgaggtctattcatatcaaagacaggaactaattgtgactactacgtggtccatggccatattctgacgacaggttatctcgcttcatgggctgaatagaccagttatgtatcactctactctttattgggacagttatagctccagacatttggaggcatcggtgtttgggggtggagatgcttagttgatgttaaagtgttgtacgaaaacagctatctagccggttggtctatggtatttacattacagtttttcataaaatacttgacatgtatatgtagatcttattcccttcagataacaatggatatctataatgccaactcgtgggttgttctggtttggacgggattgtatggtttgcgtcgtcgtgatgataagcaacccagcgcagatgtgatccttgggttgattatgtgtgagtaaatgtccgggttgtaggattgggtggcactggatttgaagttcgcaggcctgggtcaatcttgtgactccgggaagtgtgtatgtctgatggatgtctagttgattgtagagttcgagactctcgatggctgtttcctgtcgcgttgcggggatatgtcatctccatctatggtgtttgctatgtttattctgtgtttatctatgtagcaactggtggccagagcgaacaagttcgaggcatggtcggacgaagtagcgctgtgacatatatatatcatcgccgaaataacaacatctcaaattaaaatataccctttgttttggtgtttcagctggggaatgaagagatatatatttgatgagatcttcgaattacttgatccctgttggacaaaggaatttggattaatatgtgcatgataatatactacgatattaggactgcttgctgtgtacgacaagcatgagctttttataattccactgtctcatgtctatttcatgaaacaagtctccgtggcgcaattggttagcgcgtccgactgttaatcgggaggttggaagttcaagccttcccggggacgtttctttttgttaaaagtctttttttgcttagcatctaacctatcatgttgtgtgtgatattacaccttttttttcaccgcacaagcggcagtacgaatagaggagagggggcgacatctaaaatatcaacaagagaatagaaagagatcaaaaagatattatttaaggccctcaaagtagattgtccgaaagatactatagagaaaggaatcttgaatattacatacgggtttgggtatcctttgtaccatcttaagcctatggaccagattatcgaaccacgccgtcaacattggaaggagtcctaagcagcccgttatttgtaacaaataccatcacaaattgcttcgctggtacatcgggtctgtacaagcaaaaccattagatgtatttttttttatgcttccatccatctcttttcgcgctattataagacaatagacagagaaaaataatttatatttttacatgttgtattagttcaaccaaatagaacagaggataaaaactaggatagcggctgcagcgaataatcattgatatgtatggccatccacctcgcaactacaagaacagtcgcgaccaatatggaaccagtcaaagctagatatcaatggagaaaaaaaaagtagggttgaaataccatatcaactggaatcaccagaagaaataaagtatggagagtagaagaaaccaagtagagaagagaaactgtcatctgacaggtacatgtatgtaatcgcaaaataagaacgaggccataaacattgatacatatgtaggcgagaacatctgggtttaaacaaggatagaactcaaatacacagggaaagcagatgccagcgaacaaggatcacacttctctgaacagctaagcgaccatcagacatctcgccaaggcaaaagaaaactagaccgtccacagtgattcaccctctattcatgtataagtaatagaacgaaaacacacatactcataatcctgtaacactctgtccaaaagggtagaataaacgccgagcataaggacccaacgccagtaaaggcataccaagaaaacaagaataagtaaacaaaggaacaggaacctcgaccaagaacaactcaacaaagggtataggaaggttggcccagattaacattaaccgaacatccttcaccatggaatgcagtgaagaatgcagtggaacattggaataggagaaaatttcaggtatgaatgaaaccatgtgataaaagtagaaaaaaaaaaaatcgagcctcagatgatagtgtaagctggtaagaagtaaaacgcccatctagataacgccagctgtcgcgagctagtacgaccacccaccccctaagggactgccagactggcccggttgaggttgtcctggttgcatcgggccaccaggtccgctaggccacccaggtataccattgcctgccatgttcattgcaagatttgcctgttgagggtttccgcccatgaagggttggccaccatgagcctggttgggtggatacatggctcgtgccatgcccggataaccggtcgggttgactcccggatatcctcccatgccctgcataccctgagcctgcgccacctgcgggtgttgtatttggggatattgctgaggcatctgaggtattgattgtcgctgttgattgcgaggagactggtggtgatgttgctgctgcggatgatgcccgaggggagatgggctttgttgcggagcagacatttgttgaccatactgagacattccaacgccctggtgacctgaagacggcaacggggagggctgtggctgtggaggtggctgcccccaaatctgctgttgttgcggtgaatatccgtatggaggaggctgacccataccgccacccatagatggattgggccgctgttgcatgagattgggctgcatgtttggtgggattctcaggggagactgtccaacggactgtgggtgagcctgctgggggtagtttggttgtccacccatcattggattagactgcatgggaacctgctgagggagcatatgctgcgtatgagcgggattcggcatcccggcagagggaatctgtgatacctgaacgggctgtgacacagacaaacccgattcgagagcggtattagactgggcctccgagaccggggcctcgcggggcttggagtaaaattcatccaagcctttttggcggaaactgcgctgaatgctcaacattttgttgaaatcagacgtgtgttgggcttgattcatgaggtctgctgccgagcttgtttgcgtgcggtcgtggtagggttgcccggtcatttcctggcgtgcacgaggcatgactgtgtaatctcgcagccgggggtcatccgtcgtcgacatatggatcatagggagtggaatcgaagattcagaagtatccagcgagagcccgtgcggcaatggctcgatggcattactgtagacaacatcgttatgaggcagcgccggcaacaggtttgtagctggctctgagacggaaccatcgcgagccttagccgcaccaggacgtttctcacccgcgaggtcatcctccgtgaagccctgctttctagctttggtctcccagtagtcatctcgaacccgacggccattcacaatcacccggctcccaaactgtcggaacatggatctggcagagacaatagcgatttggcgggaccgataggaatatggcaagatatcttgctggataagatcgtctttctcgatttgggaagcaatgattttatgcaacgatcggttcttgttgaacaaaagatacgaatcacgataattcaataccctcgcgcactcagtcgcaagcatgaatagtttgttgccccggaggggaacacggaatgtccggcatttatactcgcggccaccctgcggatatcccataggatctgccttggtctctccagcttcatcaaactctttagggatgtactcatcaccttcttcattgagctggtctgaagtgtgatctctcacagtagggagcgctttgactagggatttcgttggtgtactcttgctgtccggtgatgccagagacggcgacccggcggtggcttgcgacagtgggcgtgcttgcatttggggagtttgaataagcgtgtttgcgatgtgttgttcactagagcttggccgaggcgtctttgggggacgcccgcgcttgcggcgactttgttcctctaaaaaaagagacaatgttagcgtatattgaggtacgcaagctgtgattaggcaaagtgcaagcgctggtgggaatatagcacagttctggatggaacctattgacaatgccttcccgctgccaacgtaccatcgtcctgatccctttcgacatgtccatttcccatgtggtctggagtgcgactacgcttgacaccacgggggcttgctattgcatgggaatgtgctggtagggcaacagagactaggagtatcagtttgaaagcagtgacggggaaggaatacacaaagagacgagtcaatgagtaggaaaatatgattcattccagcaagtagtcccatcgatagaaaacagaacgcgcgcaagaatttgtgattgaggacgaaataggaaatgaacggcacgaggccaagacaagaaatgcgataagacacataccggggttgcttaagttcgcgggatcgatggtccccgaggggccatcaatgacatctaaaccattcattgtagataaggagtgagaagtgccatacatagcgggtcaaaggtcggacggttagagcgcccgtcgcaagatggcgcgtcaagtgaacgcgtaaggtattcgggcagataaggaatggaaagtggcgcaagagagcagaagatgctcatgcaagactttcggacctctaaggtagatcgaattaggtcaagtcgtcaaggagctgccttctaggtaggatctcggatgaacttgggtttgagaggggaaggggatcgaggcggtgaagatgggagcctgagtgttcaggtgttctgcaaccaagaggacatcaacttgttaataatgggatataatcttgcgcaaatcaagattttgatctctttctattatgtctctaccggggagaacttaagtcttgcaggggcaataggaaatagggaaaaaaaagaaaaaaaatagaagaaaacgatcgtctggtgattggtcacgagcaggaacaattaggactcacaagtctgctgctaagaaagtggcaccgaatcagacaaaagctgggctaattcctgcaggttgaatctgttttgggcttggtagaggctaggccaagtcgtttgtcctagagagctccgaaacaagtaaaagatacccacgataatgttggagattagtaattttctccccgggtgatagattgatcggatattgaccggatattggctacgataaaatgatcagatctgaacgaggccggagggaatggtgacctttttgtgatcttctgggcgtcgcgggtacggcgccaatatacgaatagggtcgataagagactaatgagatcatagacggtagcactcagctacagcagaagcatagaaaaatgtagttttccttctccctgactcctttgcctcctacataatccaggacgattttccgaggtagcacagcgatcgaatcctcgatatgggagttgagaaacacggagaaggaccctgcgtcttttgggcaatagcatccagacgtatgcaggaagggcaaaaacagagaaatgaataacgaattaaaaaaatcaaaataaaagaaggtgcaacagtagcacaggagtacaacgcgctttgggtttggattcctaactaggtacagaatacagaagatgtccgcattggagccaatcacgaggtcaatcacatctgaagtattggtattgtccttgtattcataaccacagttttaatatattgttgccgatcgttagatgccaaatatttcgagtatagaccatgggagagggtataaaattacaaataactttgtttgggtgtacctgaatggcctttttcctattccgatttcgagcaaggtctatcacaacatggacagagtctagacactatgatagacctcagatagagccatgatcacatctattcagtctggatcgtgtattgtgtaacttgacgtgtcttaaacagctactgggggtcaaatttatagacgaaagaagcaagacgtgaaaacgaagagtgatgaatatcggacgaagctcacagacaattggctccacagaaaagagacgaaattattgatgattcttgcgtatatgcgtgtttctcagccatgtccactagtgtagtaaacaggatctcaaggtccaatccgaagcaaagcaaccaatatgcgcggtcggattatatcgggtcaagcacgaactagaaatacaaaataagccacctgatactcaaatcgtcctggtcgtctagactcaaaatgtagttcttgttttatgccgacacttaacaagccgggcgataaccggagaaggccatagtgaggggccattagataaaagtaggaagaaggcgagaggaatgtgctcaggccgcatcttgtcagcctaacaggagctaactatcgactagttagacctagtgctttacggatgatgggcggggtatgctcgtgcgagagacttgatttagctcaggattgcttgattcaaatttacccaaaggatacgtgctcatggttctggggatgggagatgctcgcattatagtaatgggctagaaagcctatgatatatggtttataacggggagcgaacggtcgtgattacaatataaataaaagcctcgtgttgggtgtcggtgttttcacagcccagttgaggcatttaattcgccagaggatgggcggatgacctgcagaaggcgctgtagatggaacgggcagggtcatttgagcgggaactccctgattagtcgatcaacgaacggcccatgcgcgacttagaaagagaagctagctcgaaatggctctaatcagcacaatctccaaatcatccatcgtgcacaccctttatgtcattagtatcgcccaaatcggagtaggcttgagcccatatactcggaggcggctgtacgaggtagagcaagatgtagtatcgtcacacaacaacgcccgtcgagacagtcggactgcactatgaagtatattgcgaacgtacaaggttcgaaatggaaaaagcccagatatatgaacgctgtcccaagtctcacagcagcccggtcttgcagagctgccgttctccacgctcggcgccggcttttcttgcccgtcacacaatgactggatctgtgctaggcctaagaacacaaggtgaccttgcagctctaattaggaaagactgaatctctccatcatggacgctcgatttagaccttgagccacctgggtcctttagctaacggacgtagtcgatccatggcccggatgcaacatactttgctaactaacaccttgaacaatggattaacattaacttcgtgaaccatcgactcccgccgagtggcgggtctgttctttgttacgcatatttattgggttatgtacttgctcttaacgccattgacagatacgtacgtcaggtaaagaccctatcaatctcatcgtcaaaaaacatttgaagataaccaacgacgatcgcgataccgccacttcctggtgaaacccaatatatatcgttggcaaacccccacttctatccctacattcctagagacatgcagtggacgcatgcggagcagttgattgatacagatatgcggaggagaacatcattcattgggacaagaaggcattaagaatggcagagtagacatatccaatcgcatctccagcctattgcacttcgactcaatctctgagcgagagcgagttcagaatgttcctcccttgatgcaacatcagaaccgaattgtctccactaagacaacaaaggacaagaatagctctggccaagagttagattctggtagcttactaccgtcgatgagttagaggcgtacgcatatcatgtccctatcctatcgttattctgagtatggtaattccaggaactaccatccatgatctgcgtagaaaagacaggcatatgccgtatcaaaagcacgtgtaagttgtatatacccacgcgtcacaagcaaaaaccaagagccacagtttcctatttaatataatgagcatgcttgacgttgccctgagagttgcgcctccggggccacgcgttgcacagacccgcttctgaagtggctatatcctagctttaaatctatcagctcttttaaagctatgcagaccgatttggctcacaattgtagaattggcaactacatttgtatatgggaatacatagcagtgcttgattcatcctgtataccatggcgcgcagatctataatgtagagcgggcctgatccaaatcccgaaaataaggaaagttctcttagtttggatgtaacaatgaagactggaagtaccatgttactccgagaggctgcgctcatggacttggtaagatactgctggcacagcgattttgagctaggttaagtttgacccactacttcgtagtatgtgacgaatatttaattcaaaggcgcttatgcgatattcatcgtctgagatatcccttctgttgtacggtgtatattctagtaagcccagcaactagcctagttgcagctgtatgctagatacccggagatgagaccttactagggaattgataagcacactctcaaagcccggtcacgtacatgcattagcatgcattagcatgaattagatttgctatttcttttaggctgcaataacaccagcactagtactagccggaagtgctcggcgtagagaactcgtgactcggagatcgagtaagatctgcagggtatgaaacccgctaagcctaaaagaggggtgtttggaagacccatccggtgtggtgcaggagttcctactgggcgtgcagtgtctgagggagttagttacacgattagtttagtaagagtttgcgtgtacatcgtggatgttggatctactagtaagcacattaggaccgtctttgcaatatgtaagtacagtgttttgagcaggagtgtatcgaatacggttgtcagagagaaccaagaagaagcatgtattctagagacctgaactacccaatgtttcccggggatagcatcactagcaaatgcgacactcgggaagacggtcttgctttccttcgcctgcaagaatggctcaatgaagcctttcaaggaaaacgtttcataatcgaactcatccatgacgcctgaataagaactggagggagagaaaaaaggtggagacctacacatcctgaaacagccaggtcgatatggtaggagtcaatgtcattgtagtacaatgtcttctatgtccaaggagcacttgccttgtttcaagaaagaaggaagggaagagagacccagagatgctggtaggacaaccgggccggatccggatccgaaccacggtacggagtagggtaagagtctatcccgagatgctccatcgacgacaataatagtactcgtatattgtacagttgtcagtttgaagtgagcgtgtcagaaatatgcccgaaacagcgcacagaccgaagaaattagcttgaggtttgagtgggcagttgtaatagaatggtagccgacagatttccgcagaacggccggaacgtaagaagagcctcctgagctgtcaattcaaacccgaaggctacaaataacatacacagaagagtctatatcgtatattaagcatttccccgaccttttttgctgtataatacccaaaataggccaagaatagggagaagatctctaaaaagaccaccatcgagcactggagtctcaatgaaaggccattcttgtctatatcaacacagagtaacggctggactgattttggtgtacaactatattgtagcaaggagcggacttgatatccagtgctaaaatgcaataaccttatgttttgaaccgaggatgaaggtgtggggtcgaggttattttgccatgcaaatagggaaactttgccgaacccaatccgtaagaaaccgaggtccatccgagaggcgtaaaacaacaaatcgctcatcatgttaacggggccagtaggatgctattctcgttattccggagtacagcatacggagtactcgtatggagtatcgactggatcgcttatgctcggtcttcgcatggatgatatttgttccggttcgagaggcgatattttgtttcggatgtcctttgttagccgttttacgagtatggctgcagccatgaaacctctagttaactagctgcgaccgtcaaaaggcacgacttggagcagccaattgtccggcgaattattagcttgtaaagcgggtgtgcgaactagtccgaggcgctaaaatattgtggacctcaccaacgtgtgtgagcgggtacagaacttgcttcctaagcgtcctcaagtgtccagcccttgacgagagattctagactttgactttgggcttggtggctgtaatggctttaattatgctggaattagtggggttatctgcggcagatctgaccatctcttccttctcatcaacggtgttgcatctgcaagtttattgtagtcgcctccgtatgttgtactattatttaatttacggaggacgacagttgaccggagagaactccgtatttttcgtccatgcttggcttcctatttgattcaaggcggggctgttgtgaaataggaagtatcggcagggtaataattccactgctttattctgttaaactcagcggagttaatgcactccatcttcgcgcgccacctttttggttttgtccacggaaggagctggtgtaggtttccagcgggggtctggagcattacctccgtcgcacgggcggatgttatgaccaaacaattagggccgtcttcggcggattcgaaagatcgtcaggaggggcatattgaagtgtagtattgtggaatgcttggacttgtcggtgtggatgttctagcattatgggagaagacggtgctcgcacttcttatgtacaccatactaggatacctaacgcagtggaatctctggagttccaaggttgccgggctagggtttgatgagtcacccagcgaaaccgaggaaaccagttcctacctattgtaggtaactatgaagagaagaattaatctgattttatctagccatgttgtatgtatgttgtacgctgagagagaagaaatccgaaagcaattaatatacaaaactgcaaacgggctcaggatgaggggtttcggatttccaaggaaagtaatccgtggggatcgtgagtttccccgtgcaacgctttctattttattctcttttccctgggattagggcgaataagcaagataagctccgcagaagggtctccaccgaaaaattttcgaagcatcaaatgatcaggaaaactggggccactgtgagggtccgaatagccgctactccgggaatttcttttgcccctttttagccttggatgatgaggtgggatggaatggtgatgtgaacaaagggaataaattgtggaaaatattctaaaatgtaattcttcacgaatatctaacttcctggggtagaatagtctaaagagcacgtagccaagtcttaaacaagaagaaaaaagacgagacccatcagagcctggaactcagggaaccggtttcgtgatctggtgacacggcagacccagggcgcttggaccaggttccccattattcttcgagggtataagactcgttgcgcattcccacctttccctagcctttccctttggaacttccccccaggacttctacacattccatctctctaaaaacatctcgggaatcatctctctatcctataacccggtctatgatccccaattaaaacacaatgaatactgccacgcaaagaacacccaagaccccgaaaccaaccgcctccgtgccaattgtccaaaataaacgctggccccccatggcgaaccgaaacgcccttccctacaagctcacccacatctcgaaagagaaactcgcccgtgaagccaccgcaccagaccctgacctgcgccgttgcgtggctcacttccgcctgcactgcgggtccgtctcctggaccgagaatgacatgaagtctcggatcagctcttttgatttcgaagacaccgatgacgaagacgatatggaggagatcaacaccgaactgccggtcctgaaaaacagagctccggccaacgacaatacagtcgaagtcaccgaacaattatcatacaaatcagagcccgtcgctattgcggctaccccggcatcatcaacatcaccagcgtcgcctgaaaatcccgagcatggttttttggaaaagggtcgcaattgtcttgaggcgacctccaaacatctatggacagggggatcttgcatagtttccccaatcgcgggttaacctcgccgccccttcctacattctcgacttgcccaccttttttctctcttgatcctttgcggccgacactacgatattacgacttgatgaccataatgaacacaccaaaataaaccatttgtatataactttacttttcgacaatatgtcattcataattaccaaggaaccttttttttttttgctggacaacctgtttttcttattacaccataaatatcgaataacaacagccttatggcctatggcccattcaaactcggaactatttcctctttcactcttcacttccccaaactcctcactctcactccccacatgaatctattcttggaggttcccaacccagaaggtcaagcgaagtgactcacctgccgcgtcgccccaggtcacatgacacatacccgagaaatgaaaaaaatagaatctgacgatctccaagacgccaagcaataatcgtcaatcctggagaactaacgcaggccccaaacccgagaattgggggctgtggaactatgattttcgccgtggaatccaaaccagccaggaagaattctgtatggtggaaagtcgcagatgcagtggcgaatcacccgccgatcggctcaggtttcatcatagtcatgtcacattctcatattgaacggtcaacataccccggcttcaaatgacatcccattatatccctgccatcgttgacaaaagcacccgccaataaattggtctctatcaaactagtagattaatggcctgacctgacgtcgctatgatcctcccgatcgttgtcttgactgaaattgagttgccagaatgaaaacaagaaacacaaacccttaggccttggcacacaagtcacttcagaacgtcactcacttccccggaacttggtcgctgctcggccgaaagtacatcgaactaaatctgacacccttcttgcatcgacatcgcgacagcacacagcgatctccaggcccgcagagctaccgtgcacgcccgaccagcggatccgcccgattggctggatctattttctctattccccgtagcaaaagtattccttcggtgaactctcggcccgcgagctcgagcacgatcgacgtcaatgttcaaacatccctggtgttgtttatggatgacgctggctggctggatgccgaggatgaacgtgcggacagcggtttcgtggaaagtgggtaggacaatgggcctagtagggccgatgtatatatttgagtttgataagggccttgtgtcgtggtatctagatgcttgagtatcatatgttgtttcttggctatcgggtactaacaacctgagagtgtgtgatgatggattgattcggtcattgagaagtggcatgttatctaaatgtgttggatgggccatttacccggatgtttctatcaatttaggatgtaattgtgttggtcatattgaaatagctaaattgaatcaagcatcactgccataaaggtcaaagagcaagaccccactcgttcagtagtaggtttgtcccctcatggccattcgagtctcaggctggaacatcctccgtgtctcatgtcatgccccagcgccttcggaagcttcatagcagcctccacagaggcgatctggacggtccactacccacggctcagatctaaaactataacgacagtctacctacggtagagatctaaataccccgcaggcccatccccgcagtctgtgacgaaaaaggtcactgttctaaccgagatgacatttccaagtgtttactgcgccacaaaaggtctagatcgcatggatatagttgtatctggggtagtctctcgaaggccgctggcatatatacatatatagtaaggcacggttcgttgcataggaagtatccttattctacgaccactctgtcctagttgagagatcaattgtatctgtattcccaatgtgctggttgatgccgagcctacaatgaagtatgtagtgtgtcgtttgaactttaccgtctttgtatcgatagttcaagttagacctttaggtagcataggagtgtctgagcaagctagcgatcaaatacctctcaagtctcagtagaaagactctagtcatagccaaactatgaggatttactgttgctggtaagtgttagagaccaaaaacccgcagaaagtgagtccaaatgcaatgcatgtccatatgtggcttagctcgaaaatcagtgaatgcccgacacgcatcttcctgccactccaacaacgtccatcaaaccccaactagcaaagatcccaccgattccgcaattcagtatggagagaaaactctcatcgccaatggcacccacattcatggtgtccgcaccaggaaaagccattgtcttcggtgaacatgccgcagtgtatggtaaacccgctattgcggcagctatttctctccgatcgtatctcctcgtcactactctctccaaatctcgacgtaccgtccaactgaatttcagggacattggcttaaaccatacgtgggaaattgacgctctgccatggaacgtcttccaccaacctcccaaaagaaggtcgtactactctgttgtcgagtctctcgactcgcaatttctcgaagctattatgccacacgcagaggccgtgtcaaaagacctcccagagaagcagcgaaaaatccatataaaatccgcaaccgccttcctttacctcttcctctccctcagctcctcggcaagccctgggttcatctacactcttagatctactattccaatcggggccggtctaggcagcagcgctagtgtttgtgtctgcttaagcgcagcgctactcctccagatacgcgcccttgcaggaccccaccctgaccagcctcccaaggaagcagcgatacagatcgagcacatcaatcgctgggcattcgtgggcgagatgtgtatacacggagaccctagcggggtagataatacggtctcggcgggtggaaaggccgtgatgttccaaaggaacgcctccggaccaccatccgtcattcgtctcaccaagttcccgaaactacgactccttctcgtcgacacgcaacaacaacggtccaccggtgtgcaagtagaaaaggtcaaaacactcagcaccaaccaccctgaaataacagagataatcctagacggcattggcaaaattgctacttctgcactggatctgatgtctttggctgatgtttctgactctgacgctctcggacactgggggtccttgattgggatgaaccacgggtttttggtttcgctaggagtctcgcatccccgtctagagcgtattcgtgagcttgtggattatgcgaatattggttggacgaaactcaccggtgctggaggcggtggctgtgctatcacgctgttccgaccagataccgaagataaaaccattgaagaactggagcggaagttcactgcagaaggatttcaaacatatgagactatcctaggtgccgacggagttggggtactttggcctgcggtattccgaaatggcactgatggggaggccgaagagattgatcagaatacgttcgaaaatgccgatggcgttcacggtatcgaccagctggttggagtgggagtgcaagaaaatcgggaaggctggaagttttggacgcgagatgtttctccaagatgaaacagagtcatggtcgaccagcttttacctcttgcaagtgtatggtaagctggattggtgtttctctttatttcggggttcattaatgactgtcattggtctcccacatagtggtcgagtcaccaaatttgtaattcaggtccatatgtacatagaataattatagaatacacaaagtaaataaagggcagtaagtcgtagagtcagtatatctagtgcaacaggaaccgcgtaggtgtctcttgcgattcgagctccaacgagactgactttttcctctttccagggcgatagacgagattcttcaatcctttattgaaattaaggatacacgacacggagttggcgacggtgaaaaccatcaaaaataacgacaaaactgcgaataatgttagggacacccggaaagagttgaaattagtgctctccgcgccgctgtaaattcgaaggaggatgaggataaggaatccaattataacaatcataaagaactagatgactggttagttgcctgaatattacctcgcaatcgagaatccttaccatcatcagtataagcgatttggtcttctcgcgcttgcaaaattgagccgacaggaccagggtcactatcgtgactgggatcaaacaggcattgatgataaaatccatgttttgagcttgaaacacaacaaggaggatttggagttgacttccgaatacgaagaagaaatcgaatttcaggagagtgatataaacctagaagaaatcggtcagtcacaaaacaaagaacatcagcagcatcgcaacaaacctgatatgtaaaataccgacgcttcatctgcaaatccgcactgatgttcttgtatatagaccacgaaaactccgcgcgcaacttccacgtaaaaaaagccatgcacatagtcccgatgcccaaaaacaccgggacaagaatgagctcgacctgatacaatttccgcagacgctcgccgagggcttcatcagccaagctggagatcgtatccttgatctccgtcatctggagaatgccatatgcgaacaggccctgattacagatgcagagaccgaccagctggattgtgttcctccggcgcagcgcgtcatatgacagggccaattcgtatataagcgcaaaaatgtacaggccgaggaatgactgaaggcgcaatcgtccgtttgatatgctgtcgtcgttgaggtcgtcccaaagactcatgagaatccagctaatttccccataagctccatgttaaagaaggggctgatatccgagccgggggggcccctacctttcaattgccactgtcaggaccgtctcggtgatcaccgttgcggagaacgatcgcgtccataatgtgttggggacgtatagtagaggccggctgtggttcggggccttgtgatgttgttcgtcttggttcatgaccggactgagtggtacagaatatgtgcagatgtctgattccttggtcttggaggacttgtcgtaagcatcgtcagatttgggttggaaggtagtttggaaaggcccagagatcatatcaaaattgaggggaatgtggaggttaagcggttcaggctattttcccttttcaggagtttcggtatatcaaaaacatcccaaactaaatacgtctgcctccttcacagtggggcgaccacgtaaggccattttagatcaaagccaaggccgatctagtggtgtcctagttgcaattgacttccactaagctgaaaaacagagaagctacttgtatctttgtatgatgtacaggacttagtcggccgttacacagcctcatgttatttgatagatagccgtgggatattctttacagaataatttttttttaggtattcccccttttgttggtgatatagttagaagggtaagaatattgaaaatatgtgaatcaaaagaagacgcgtatctgggcttgacatgcatgagactaagacataaccttccaggggaaacagcatattgccccatatctgggcaaccttagctcgtgtttcaggtaaactgtactaataatagattgtactaatcacattacgatgtacggggtaaaacatggttacaacataggtacttacatggatctatagcccttggtcaacaatagcacggaatgtctaagtcccttttgtgagaccgggatagaatgtattgtatgagtatgaggatgctaaaataatgcaatgatggggatatatccaaaaagaatgcaacaatgcacgccatgccagtgcttcagccgtattgaactcccaggtgtacccgacaccagtacaaataaaacagaaagaaggagagataacacagcgaagcaaaaaagcatagaaaaaccgcaaaatgcatgattcatgagcacgggcgtgtatgcatcagaaattaggattagaattccatctcgtcatcccagcccagctgcgcgtatatcgatttggattgggatttctcgggagttactggcacaactgcagcacctttgacgggggttcccatgaccgcaggtggggagtgagcgcgaggactctcggcgaccatggcatcaagcgatagagaaaacggcacagcggtgggagtagatatactctgcggtgcctgtcttttgggtggcgtctccatgattgccgaggtgcgagcatgattgagagactggctgaattgtcgagatgatgtcgacaagttttctatgaatgcggacatgtccttagggcgtgaatggttgggggaacctgggactattggttgtgtagatgagcgaggcgctggaaggttgggtaccctgaaaaggcccttgccggaggaggatgatgggcgacgcgcagttatgctatcactctggaaaagtttggaagatggcctagttggagtttcttgaatagctccgtccagatgacttgatcgtggattgtcatgagaattgaaaggatcggagtcagcgccagagaatgagatcgcccgtcgactcgaggacgggatcatggtgggagactcgaaaggagaattttccacaccagcaaatgaccgggatggagccaggctacgaggtagcccgacccccgcgtccttccttcgattgcctcgaggagtcgccatgacctgtacaccttcgccgaacggattgcgcacgggatttcttgacttccttgaaccgctgccacttacaacccgtttcgacgcatcgtctgccagatccttggagacgagctctctgttcggcttccgaagtgcgttaatagcagcatccagctctttcttctggttggccagcatttggacctttctcaatttagtctcatgctgtcgtgctacggcgttaagatcaacctcgcggttttcggtgcgttttgctttctgaatgccaccccggacactgccgctgagaacagtgggcagcaagggttcaatatcgtgcttcgcattatgctgggtcggcgcagtgttggatcgagtcagtcctgggtgccgagcataggacgctgccgctttatcgtccgtaagtactcgctgtaatgtccgtcggggcttcggtgcaggctgttgtcgcttgacttcccccccgggttccacacggcgtgatttactcgaagattgtgtctttttagcagccgaggaaatactgccggataccccgaatttgcgggtgatcagcttgcatttgtccgggagacgcgcagcatagaatggaatgatgacttctgtgcagaagtcacgcaccgcatcgctctcgactttcttgcctgaaagatggttgctactgaaagaagaagcctttgctgtatcggcggccgatgtttcttccattgtcacagcgtgccaaatacacatccgatcgagatggagttcaagaagcatgttcaaatccgttggcttcttaggcttggctttcttcggcgtatcttgcgccccatttacatctttctccttgttagtgctggaagcaatggtgatttccaaccccatgacttccaaaatcagcaggatctgcaattgtgtctcgcggaggcggagatccgaaatctgtttcttagactctgcttcacgcgacgtttcctgtgcaggatattcattcaagattctgtccttccaccacttgtggatgaatccttcctcccctgggtaaaggccattcttccccatcttctttttcttacttttccgcttcttagattttgcgccatcatcagaaagcgcaagagctgcatcgcgaattgccaggggcaatgtttctctgtatttgaggtccattttcttcgtagcgaggatagcctcgcgataggattcgatcaactccgtcgagccatgaggctgttccaagtcacgagcctggaaagcagtccgacagcgtgttaacgggcccttcgcaaagtacgccacagaagtctagaaaatgtcagccgggcaaactcctaatatcgagtagagcaaatcacctttgaaacgtagagagcctgcagatagtgctctctcatcccgtccagccactcctcaggcgactgttgcacatccacaacattggaatcgacaccatcagcatccatagccgcaggtaaatcccccaagccctgaggttcaggaagcaagaaagagcccccttcaacggcatcaaaactcctcgacggagcaagcgaatggctccggtgctctccatcacccacaaaggatgcctcggtatccccgaggtccgactcagacggaccaaagacaaccgcaatatccagcccagcagacctttcactcacctcatcgtcggagaagggctcatcgatctgagcagcctgccaccagtcaaacccatcgggaatagccccggtctcatcgacagcaacgctatctatatccgcagcatcagttccatgccatcccttggccgcaacaactagattgccctcgtgcacccatcgggcgagcttggagagcgagtatattcctctcttcaccctctcaataatgtacaggccaccattgggcactaggcgcactgcgaggacgatcggttccgtctttacgcacaagtcaatttctaacgaggggatgtccgcggtgaaaaggccgccggattgatcgtcggatcgggatgcaggcgtatcgtcgagccacgagaggggcagccttgtgcgggggagggccgtaattggttcgaggatcaagggttcatcagataaagacgccgagtgagcctatacaagttgcggagagtgagcaatagcaaccaatggattgagcgtatgctgagccagttgtaagcatgactcactctaatgacgatggaagaggtagcaagccgtctagaagtatcatctagcagtacttgatcgtctcttttcctcttctttataggtggaggggtcggttcgtggagtttgttcagcgcggatgaactgagcggatctaggacgttggggacaatgcgcgaggccatggtcgcgtctaggaaattgtgggcattctgtaatttgaacgcaagagtcaagtcttatgctaaagcaacaaagcaattgatgttggttgtgcaggtgtcgacaagatcgcgctcgaatcttggcggatctggcgtcacgcgtcgggacgtgtactccgcctggaccaatatgagacacgttaattgatttcgctgaactggtcgactgtttggcctgaaaagaatttcgcctaggtttgagattactttcttacaagatcgagtacgttaagaatacctaaactagtggtatgatagcaagaacaatgtgaaaaaaatgggatgaaatattatgaatctatcgctaatgtttagattagcaggcccaggaccagacgaaagaacttcaggtactctcacagagtagtgtgcagttccctcgaaaccgagagggcatgatcccgcgtggaagcaggaccaaaatctcctcggtaggtaccatggacagtgaggtagagatacggtgttgaagactgtcgctccagaaaaacgccaaaaacttcctttcccagccgatgaaaagtggtatcatgttgaattttgtcttcgccgaaaaggcccgtcatttgcgcgaccatgcagataatgaaacaagagaaattggtctcctagtgggaaccaacttccggattttatgagggttttttatagtctatgctcatcgtgcttcgagttgttgaaaacaaagcaaatcatcacagtcgtcaataattgtccggagtcaccggatcaagcagagcccgcttagaacttgagggtacggggtgactcccaggagaactcctggttagtgaagtggccgttcttggcggtctggtagtagatgggcttggccaagtcgaggtccttcacgatgacaccgggacggagatcaaagttgtcacggatgatctggaccagctcgtcggaggtcttggaggaagtaccgtaggtctcaacgaagatggagaggggctcagcgacaccaatggcgtaggagagctggacgagggcacggcgggcaagcttggcgttgaccaaagacttggcgatccagcgcgcaacgtaggcggcggaacgatcgaccttggagtaatcctttccggagaaagcaccaccaccgtgggcaccccagccaccgtaggtgtcgacgatgatcttacggccagtgagaccggcatcaccctgaggaccaccgatgacaaagcgaccggagggctggatgtggtagacagtgcgatcatcgaggagctcggcggggatgaccttctgaacaatcttctccttaatggtggcacggagctcctcagtggagacatcgtcagtgtgctgggcggagacgacgacagtgtcgacgcgcagaggcttgacggcaccgttgtcgtgggcatactcaatggtaacctgggtcttggtatcggggagcaaccaggggatggagccatcctgacgggcggccttcatggcagcattaagcttgtgggcgaggaggacagtcaagggcagaagctcaggggtctcgtcggtggcatagccgaacatgataccctggtcaccggcaccgagcttctcaagggcctcctcgtagtgaagaccctgagcgatatcgggagactgctgctcaatggcaaccaagacgttacaggtcttgtagtcgaagcccttctcggaggcatcgtaaccgatgtccttgatagcgccacggataatcttctggtagtccaggtgggctttggtggtaatctcaccgaagaccatgatcatacctaatgtgacacgtcagattgagatctggcctgaagtaattatagtgaacctaccggtcttggtggccgtctcgcaagcgaccttggagaggggatcctcagcaaggcaggcatcgaggatagcatcggaaacctgatcactattggggaattaatacactgttacaattggaattgatggtacagagcccatctaataatccactgagggcaaaggtgaaaggttttaggggtataactcacgcaatcttatcggggtgaccctcaccgacagactcggaagtgaagaggaaagtgccgctgtttgcaactgaacccattgtgacggtgtgtggaagaaacagaaaattgacagaaaaggaggcgggggaggaatgaggaatggagagaggagagggaaagggagaaagatatctcggggagggggaaccttggtggggttttgcttttttttccgagttacacaggcggtacccgagaaaacatagtgtgcgtgggcgaaaggcaaggtactgccgaagtaccctctgaatgtcctccgtacacggtacttcctgtcccttgctagcccgcgatcgcgccatctggggcggtgaatatgggcagatcgtctggactgcaattttcttatgacgataagatagaacattctaaagttgaatcttcttggtactttttaacatacaaccatgtccaaatttggtgtcctggtaatgggccctgcgggtgcaggcaagaccaccttcagcaatgcaataatccaacaccttcaaaccacccgccgcagctgtttctacgtgaacctcgaccctgccaacgagacattcgcctacgaaccagatctcgatattcgtgacctgatcactttggaagatgtcatggaagagatgggcctggggccaaacggaggcctcatatactgcttcgagttcctactccagaacctggaattcttatcagaggcattggagccattgagtgaagagtatctgatcatcttcgatatgcccggacaaatcgaactgtacacacacattcccctgctaccaaccctcacaactttcctctcgcgacagggcccgttgaatatcaacatgtgtgctgcctatctactcgaaagcacattcgtcatcgacaaggccaaattcttcgccggtacactcagcgccatgtccgccatgctgatgatggagatgccgcacgttaatattctcagcaagatggaccaaatccgcgatatggtgacgcgccgggaattgaagcgctttaccaacgtggatgtggaattgctgcaagagaaggaggaggacgatctcaccgcaggtgccaacccaatggccgcggaatccttgatgagcggcgggtctttcaagcagctcaaccgagccgtcggacagttgatagatgatttcagtatggtttcgttcctgcaattggatgtttcggatgaggacagcgtcgcggcgatagtgagccacatcgacaatgctatccagtaccatgaggcccaggaaccgagagaacccaaggatgcagtcgaggtggattatgaggattgagggatatcacatatgattactgcatcactgtgacttgcagcgaattctctgcatatacacccccacgaccgaccactctacccaatgccactccctgcagcagcctcgagttttcggcagcggagcagtctgagataaagcgcacttttcatctccgtttgctaatgtacggtcttacgatattggaaaagctttctaacgttcttgtcgcgccggactccacagaatttggggcttcctcgacgtttggaatcaataatacttacgataaaatcatggctgcgactactagagtcagagccaagggctttctacaccacaaatggatattcggtcatatcctcgggtaatagaaatcataatgaaaccaagatgagactaaaatcaatccatgaatatcgtgctctttagaattccaaaaacaagtcgttaatcgctagcccaactcaacgggatgaagtaaagaataggcagacccatcgcgcagtttcatgatataccccaaacagggataccagccgcaaagaaagacatcaacaagccgagaatttcgactcaattcccagcacacaactattccaatctcaccacacgtccacatccaatcccaccgaaaaacctcatccaacagccctataacagaccaaagcaaaccgaagtaccctacctcgggactcccgcataagccgccgcagccatcttagtcttttcctcaaaatcgccgacaaacccacatatcagaccccaaacccacccgacacccctgcccgcattctcaataccaacgttgtagacataccagccaagacctagaaccgagacccagaaaaccagcttgaaagcgagcgcgatccagaacatgacaaggcggtaggcgtagtcgaggatcttgatagagatgaggattatgacggcgaggaggaataaggacattaggtctggcatgacggaggcgtagacggcgaggaacttcgagacgggttcgattatgtatggttgaagcaccattgtccgtaggtgcgagagttttgttgcgagatggtcttgtgctgttgcttggaggtaggcgaatgtcgaatgatggaggactgtttggaggttttctgtgtccgggattattggttagcttttgcggtgtgggatttgtatctatatggctggaaggcaggttaagtaaatacctggtagcaagtccatgatcgcgtattggagtatatttgattgttgaagaggtcaacgagggagagacaggggcagagagagaaagagagaggttcctcgcgtgtcaggtccgtgtttttctttggcttgccgcgctttgtttgagaacctcggctcttggtgacccttgagaatggattttcgagggaatactggtgtgaggcagaggaataacaccctggctttccaacgttcaaaggcgttgtttctttccaaggttgactcgagagcgcttcgtaaggtcttgtgctggagctctttgtttgtagtagagcaatgcgaggtggagggtacgtgaggtgtgttaaaggtcagctgcagcggagactaggagatgttatttctgaaggtatatattccgatgcaatcaatgatgaatggtaggccaagaagcgaatgcgatgtttaagcttgggtgtctaagttgtggcacccagaggatgcaaaccaaacaaacttcacatgtgaagagatgctctactccgtacggagcacaacatacttggatctatagcttcacttatacattgctctcagctaatctcggtatgtttcatgaatattagattcattataaatgatactgtacagtagattagatatttacctgaaaagagacgctttctatatacaagcgcgaccaacaacagtcaaccacgagttcgtgaatgtaaaagacaaaacgctccaagcccaaattggtgaagaggccagcgcggtgccacgcgcatgatctaagatgaaccaaaataaaaacccgggactccgggctaactccaatatattgtactctaccatcgcgggcgatgggagcacaaatgcatatgcagacatggtatagtaagacagtaggaaagggcaaagcgcgagatttgacaaatttacagagcatcgatgagccctctgagggcgtcacgctcagcttggatctcggcaaggagttggcgggtttggcggagagcgtcatctctgccggatgagttagtaaagatgggatgaaaagagataaccatgagataaaacacaagttacatacctgtcagtttgaagctgagccacatcgatctgcgtgcggttcatacgtccaaccacttgctccatctccatatccgcatcacggaggagcttctcgagatccttgactcgtcgctcgaggatttcggattggacaacctgggtcaagggtacaccctcaccgctggtggtctggtccaggcgcggcgagcgagcatcgaatggtgcgttgggcggccgcggggagaggacaagtgtgttacggccgccattcatcatccgagtgagctgcgcatgctggctttccttcagcaaacggagctcgtcctcatgcttgcccatctcttcttccgtgtggttttgggcaaccaaaagaacttcctccagctctctcatgtggttctgcagaatgttgatccgttcaacggagagctgctgatctttgtcacctttatcaatggctgttgctagacgggaatgcagagaagtattggtctgaagctggtaatggactttgctgcccagtgtctcaattcgaataagggaggaagcgagctcctccgaatccgcaacacctgccttagcctccgcttgatctgcttgcaatttctggaatgcagattgcagggaagatgatgtggtcgcgacctcagcaaagccttcttggccggtcatcaactctgcaccagcggcagtgtcctccacaagaagagcgcgcagagagctggtctcctgctcggcacggtccaagtccatcttgagaccagcgaggttcttctcgcattgccacttgccatctagagcatcctcagcgcgcatgcgaagatgattcacctcgtcacgcaggttgcgcacatctctctcatagcctaatttccgtggctgacccgattgctgcgctcgagcaagctccatctcgagcagacgagtgcgcttctcgtactcgcgggcctggtatgcctggcgatcgaggaggctccgcaatgtccggtggaggacatcgcgttgaacctcgatatcgtggaccttgtcaaccaatgattcacgtgtttctggtgatttaccaccgctgttattattcacggagttggatcgagaaagtccacctgagtgagctaagctgctgggcttgcgtgcaacggagctcgatcgtctcactccaaatgccgagtttctgggtgaggccccttcctcagcgattgaagcgaatcgaccaccctgtagctgagccaaagaagcattctcgatttttaaagcttcaatttcctcaatgagcctgttgtcatctcgaagttgatctcgatcatttcgcaattgttccaactctacccgcatggcagtaagtaggtcctcaaagttatctttggattgccgctcttcaagcagcttccgcttggtgttttccaatgcggtctcgagttccttggttttcgacgacaaatcagacgtatccgttctgtcgcgtcgaagctaatgaaggttagcagttggtcacatttgcgccatagtttgtcagccgtacctgttgaacttgagattccaagatttgaacatgcgattctgatgccaagcgctgagaccgctcctcctgtaacttctgcgataattcgaccttgagttgtgctcgttcttggtctgcagctcggcgaatcttttcgatatcttcgctcttcccagcatctgatgcatagcgaacagagctattacccgagtctgagaaatagtcacttgtccgtcgattgatgtccggaccttctaattgtagccgttcgactagatcctccagatccatttcccggcggatagatctcgctagttcggagcttatctctcgtaattcattctcaatgtctgcgatcttggatataaatgtattttcctttaaacttgaagaccccattgaggtccgcgctggatgaccatatccattggtcttgggatcgtatggagagccggggttgaaaggaacgtttgctaatggtggcatagggaaatgtgttgctgatcgaccggagtcggagatctcggtgctcgatgattcacctccgggagatgtattattccccttccagccgaagaaggagctgatcttgttcccaggggttctggggttccttggatctcccgcacccattgacattgataccgcacgcgagtctactttgaaatgtagtggaggtggtctgttcatagacatgtgtaatgccatactcgttgcccgtcgtgacgatcgtttcgttagaggaggggatctgaggatcgggatgaatggttcgctatctagacgactgtgcagaggggttccattcatgaactgatgttcgtactcttcgtcaaagtagttggaaccctcgtcttcgtcgtcgtcgtcgtcgtcgtcgtcctcaagcaccgatcttaagtacgaggcggaaccgtgacgggatgcagcggtatcgatgtataggggttgagaatcgttccgtcctcgcgaatatctagagagttgggacagaggcacgcgattagtcttccagactttggagaaacggaatagcatgtgtaggccatatcatgcttgatcggtaggtagcccgggggagaaaaaaggagggtctgccgaaaaacgcgggagaggaaaaaccggggtcatgctggtcgcgtacctattagagttctttggcaccgatatatatgagtctccatccaccgacaaaggggagagtggtgcagtgggaatcgaaatgggtttatctccctcgaacgaaatgggagaggagggatgatcagggcccgaagtcactggaccatcattatgcgggagaggtttcgttcggactggaggagtagttggaggggggttaggactagagaagctctctgaatgggcgggagagccgccaaactctagaggagacgccatgaaacaccctggtccgtatcaaaaaatagccatggatcgacagccgttcatgctgataagcacgggaaagagaatggcaagcgccaatgagacgaccaaaagggtaaggattattctaagaggatatcagacgagaagggaaatgggagaaaaggagaaagtcttggtacacgacaaccccgggcgattggcgcaaaccgcccgtgggttctccatttcagtagcgctggcttcgggacgagtaagcgtgggtggagcacaaggggggctggcgtgggtctggatgtgcatcaattcaattggtacgaatatcatacaatgatgctttggccgataggatcgacatcgcttgagaacctacttcgtatgtaccatgcagcgtggcgatacgcttgacgtccttgatagtccggacctggtaagatgtgtataatatacaatgtactctgtacggagtatatgttgtatagtactatatggagcacggtgataaggtttgaaatatgaaaatagaacattcaatagtgtcaagtgacacaaagaacccccttgagtcgtggagaggagaggagagggagaggttagcccgggtgaatgcttggcgattcaggggtagcctttcagggctgtgggaagtaccgggaatgtacttttatgtcactttccttatctttctcttgaaaagatacctccaagtactttacgtctactttgatgtttgacttggtagccctatacaatctactcagtaactactctgcgtatctgaagttttcactattaggaggctacatttatattagagttgtgtatttcatacggcttgtatataacttcaacggactatggaaactcaatataattgtctgcagtatattaaggggccctccgaagacagtggagataccccttttccccttccctctctcgtacaagcttctcaattttgtggaaaacccaaggccataccctgccagaagaacgtgcacaatccaacacgctaactacggtatgtccaatcaaagtgagacgtcgatcaacacagcgtctcgccagacactcgggccagcgcgtggggccggaatgtgttgcttcaacgggctaagcgcccggcctaaagcacctgttcctgcatcgtgtcacatcaggaagttggccaatgtgattattgtactttgtttggaagaccccgtacggagtccagtccaccgatatgagggttagcactgaagaccccacctagaaagacattactacttactgcaattcatatggattctttccgcggctggaattgattggacaaccatatgttccttgcttcagcttaggacccaaggatccaactctactgtctacatacaacatacaatcccccgtgttgtgaataacggcctagcagtaatcacacactactcttatttgacgttagggccgagaatacggagtactattaggttatacaattattgtgtcaaccccttatcgatctacagggtttattcagggcgttgatgcgactgctcggactcgctctttgttacaccctaaggagataattgtttcactggtacaatatgtggtaacattgaaattagactaaatgttaccatcccgacaaatggaaatatttatatgaggtggcttgatctattgtatgaaattaagggttctaagatgcgtacaacatagggctactccaggggtccaccatagctgtcacagactgagttgacaggacggaggatgtaccatacggagtacggagtacacagcgctaaactgttgtctcagtccacctgcacgtcaaagaaaagttggcttatgcacacccgtttgatccactcccttccagtctagaccatgtctcaacctttgaagctgtctcacattcaaatacttaaatcccagccactgctgttctatcattagaagtagttgggagtgtccgggtccaacggctggctagatgtctcgatgctgcatttacgctgtttcaggggcccttgctgtatgcacatctctagatatgcaacatattggatgcaatatctggcacgtacgcattataggtatggcggtgagcaaacctcggcctcggcgcttccctttaaaatccttcgtgctccctctctttgatcactaattcagactcgtcgcattttccagcttcatccacagtggttgagcattcgacaaggtttgtgcatacggctggacccactgcagacaaaggcgatgggattatcctagccacctcaaaggttttttatggggcatctgttcgccggttctgatgatctggaggatcccgacgagggctcaagcaaaatttacagtcaaaacacttaactaactggcatcctaacaccgatatactcgttctgaaagttcccctgtgaagacattggattgcgtcgaatgatctaaatcaattcgaaaggctaatgcttcacatcgacgaccacaagcactgccgttcgatcattgagagtgagattcatacaacgtgatgatgaactgggcggggtttgaactgttataaggtcttctaagtctattccaccattggtgttcgacacttagtgtgtccttattactatccgtactaattatttttgccctgtgagctaagagaccagtaaacagtaagatataattcaagggcaaaatatcggtaatattatagtagcccaatgctaactactagtaactactggtcccatttactctgtgagcctgcgaccatgtcattcgacaatttcaacatcgagggcaacatgaacaccacgaacatacctttcgccgtgaagcgaggcagtaaattgccatagttgatcgacaagctaaacgaaaagagattaatacggcatttcaaaggcgactagacgttcatggaaattccaccgaccgcggaaagctctcttgaaatccgacctaggagagttagtcttcaagcatctcgagatgaaggcatctagctgacttgcgattatccaccgcttgcttgctcgttccaatgattcagttaccggttgcaatacctcggtcatgtggttgaaatgcttttccagccaggcagctaccgttccagccttctgaagtaaaaagacggccgccaaaggcattttgcttatgctgagaatgtcgtccatacatgtaatgtcacgagtgatgttcaacgccatttctagagctgctatagacgactcccggacattattctgtctgcctgggacgctaccaaggcacatcagccgcttcttatgaagttcaatgagagctctacttccattagcattaaagaaagatatgaccaaggggtgactcacagaagaaggataattatcgctctgtatggtcgctcccaatcctttccagagctattcaaaacgtcgaccgtatgttttcgaatcaatgactcaattctccagaaatcatagtctgtcatttccatcatggagacgggatgaatctcggttaattgtacgacttgctccagaaaatagacagcctctatctgctgagcaaaacctggaatggttgttcccattgcgtcagagagcagctttatttccggatcccagggaccaaccccagtatgattgctccatagctcatcatcaacaggaagttcatgcccgctctgagagctctgaacgagcaaggttcgtccagaactctcatcaaagtgatagaagagtctgtcgagcaagtaaatcgaccaccacacacgcttcctctcttcttcaaaaacagaggagttctggcggagccgatgcaacccagtagcgaatcccaaattgacacagcaagatagcgttgtatatgaatcagagtgcaatccacttccttgctcatatatagctagcagtaatcctgactgcatagtggctaaatgatcttgtcgatatgtatgtaggagcgagaaaatctttttgcataccacatataggggtatgatttcagtaagctgagacagttctgggacatttggcggattcaccagcaaaatatggagaataagggaagccaactcggcacagggctcatctcgcagtgatgcaactctttgtgccaagaagatgggatgaataaagggaagccattggtgcatgcatcgttcgtagcaacctataacattttctaatcgaagattcaggcttgccaagatgtcaaacatgtaggaagtgaaaccaatgtcgatgctcttcttcctgcaggtgccgatgtagggttgatcaaggtagtaaagtgatttgtgaataactaagctccaatggtcatgatcttgagtgcaagtgataggttgtagaggctgatggctaggattttcctgagtagcacaagatgtgtactgacatggaacgttattgcttcgccaatttagccaattgctccgaacaaggttgaatccattatttacctgacacaacggctgcagcccggaatttgccgatcacatttgcgtttctgagaatgacacaagaaacaggcgtttggagcagcactgcctacttgcataatagcaaaaatactcttgaatgggcgggagcttaaggagcgtggattcatgaaaacgccagtaagtagtggataatagtttggcctattagggacaagtacaatataaagcggtgagagcaatactggcagaaccagactcttgttgcgctagtccgctagtgtcggactagcttcccttggcaaatgaagtatgtgatgggctatattgtatgaatccttcaatattatacaattccctaggtcccttaggctgcttatcaatttcaatcataaatctcagtgtggtactcggtgttcggtgttcggtcttattaaaagacaatagatcgtcagctataagtatgctcgctactccgtatacgcccattagttctttgccaaacctcatcatcggatttcccaaactttgcctacccccaagaaacatgagtgtttccgacgtgccttgtgctccatcccttttcatatcccacggtacagggccgtttccgctcttggaccccgaacaggaatcctacagacaactcctccgccgtcacggaagcaagctcgacggtgtcaagggaatcctccttttttcggctcattgggagaccgagactccgcatatatcgggtggcgataatcctggtatcttctacgattatgaagatatgcgggataggctcccgccggcggcgtttgaattccaatatccggcacctggaaatgcgaagttggctacagaagttgccaaccgactgaaagaatgtggatttagtcctactttggatcttcagcgtggatttgaccatgctgtctacgtcccaatgatccttctacgaccgcaggccgatatcccaatcgtccagatgtccattctgaaaggacacgatgaacaagattcaacagagaagaacatcaagctgggacaggcagtggagtgtttccggaatgccggctacgccattgttgggagcggcgggtcgtaccatgacttcgaggctatcgcaaaggcattctttacaaatgagcctgtgccagcaggcacggaacgattcgaaaattttttgaagaatgcggcatccattcctgattcttcccagagagaagtggcgcttcttggatggagggaactccctgctagtcatactgctcatttgaccaactgttcagagcatctaatgcctttcatggttgcggcgggaagtggaggggacattgccggagtgagatttgatatgtatgagtacaagggagctccaatgagtttttataggtggtaaaggaggtcactcagtctgaaggtcgaccttcagacgaagtgtcattcttgtgtaatcacttcttgttacctataggaattatgaatttcgccttttcattaataatctctgtattttgtttccatacacgctgatcgatttttgatctggctagttgcgaagcattgcatgatagctcattcactcccttgggcactttccattatcagcgccctactgtgtggattgaatacatggaggtactacctggatacgacggctaaagacagagacattgcagatagctacatgtatttcttatgacaaacacttctatcctttctcacctccttcccgaattccatccatgaacctattcctctattgattgctcttcccacgaagtacaggcttatactcattttcaatgaaaataaagtgcgcaaggcccgaacttcgatttggatgataacggaaatgccacatggatattcccctccttcggtcagtgaccctcccgcagctgcccctcaccgagctaaactacggcagcgtggcacttacttgccgaggaacactagattagccacgttcatgattgacatgaagagccaaatcaagacggctagaatcattgtgtaccacgagttggtcatcttgacaccttcgggttcgagctcggctccctctccaattacctggtccgcatcgctctcgtcatccctgcccgccatgcgccagcgcgctttgccgggataggccgtcatgtatttatcgcggcaggtaaagtagatcagcggcgcggtaacaaatggaagtatgatactcagcgctacttgcgacccattgagtgctgcattaagcccttcgcgacccacggctcccgcgatgacgatgctcggtgtgatactgatggtgcgggttatgaggcggcgtagccacggcttcatcttccagttcagcgcgccctcgctgaccatctggccggcgatggtgcagacgattcctgctgatactcccgacagcaacaatgccagagcgaatatgatacctgccgcgggcgaaatggacttggaaagcagatcgtgaataccaaagatgtcggcctcgagggcaagtgggttttgatatagcgcggcaccagcaacgatgagaatggcggagttgacaaagagggcgaacgtgaagagcgaaatggccagctcgagaatcgatactgtcagcgagtgcttaattgcgcctaaggacgggacatagtagccgttgtcgataccatcatctagaacggtatatcccgacgcgagctgacgaggcaaaagcctacttcgctcatcgtattcgcgtaggcggggttgaacaattcccgaccctaggtacagactgtgaggcatgactgttgcgccaagaattccacaggcctgatagatactggaaaagcatgagagtgagataaggggacagcggggaattttggactcacgcttccgactcgatgagatattttgacggaatataacccttgaaaacctcccccggggtagcgccatggatcatagacatttggatgcaaaaacacacgaccacggcgagaaccaagcaaatgataaacatttcaaagtaccgtagacccttcatagacccttccgggtggtagaaaaacagggttaccatgacatcgaggatggaaatagcgcatcctgcgaccagcggtaccttagggatcagaaggttcaatgcaatggcaaatccaatcacctggtcagttagcacttgtagacgcacaatatacaaaacggggagtgaatcaggggtctacctctgctatatcggtggcaataatggcagcctcggcaaaggcgtacaggatgtagttgagccagcgcgggagaaacgcgcgacatgcctcggcgaggttcagaccactgacggtgccgagcttgattgccaggctctggaggaaaatagcaaacaagttggacaggagaacgatgaacaatagacggaagcggtacgaggctcctgcggcaatgtcggtcgagtaattgcccggatcaactaggtgcaggcatgtaagtgaggtgaaggggaaggttgcgggacgacagcattctggacatactgtacgcaaccgaaatcataaagcccggcccgatgaaggagccaaaggtagcgagcatcttccgggcgcgctggatcagcgtgcccgggtcggcgtcaccaccagctgaagctggaggagaacccgaggggtgggcggctgcaggtgtctgcagaccaccctcagtggactggccgcgatcaattgatcgctgagccagccggtaggtggccttgccgtggccgtcgctttcggtaggagcatcactggctatttgacctgggacattcgaggccgcatttgacactgcgttagtgtcgctttctcgaacggcccgaatgttgacgaggccgttgaagtcctcgttggtggtcaggtcactggagtttgggttcgggctttggttgtagccgtcaccctcgaggggctcctcggtgtgggatgtcttgttcattccgttgacaactgccgcagaatatgacttgttggtctacgattgataatacttgagacggggtgtcggatgaatgttggggagacgcggaaataaaatttatggctccagcggtactccgtataggcagcagaaaaaggaacccgaatgaagttttccccccacagcggctggtttgtaccgactttccccggagggtggattgatctccgattttgtttctcttctattctttctgagccctatttttagaggcacctagctcaatacagtcaatggagacagacagcaccagaagatagccgggattacttcggtgtcagactccatgcccgacatttcgtgcccaattgggattataccctcgcgcaaccccaaatacattccgtatctcatattccccatttgtgctttcatagtgggtgaatccggctagacaaccaaggatgacatggaagaagccggtgatgacaccgtaaacagccccagctgcggcagcaacactgtaagggcagacatcgtagcctgcaggttcaagttaagtattagttaaatcattcaaccgatccaacaggagcagcgaagagagcgaccccgaagctttcatgatgtaggagagacggcaacgaacctccgttatgtgccatacgagcaaagacgtatcctcccaaggcattgaaccccataacacaaagttgtgtctgaggtttgccaccatatagccccccagccgctgaaggacaggaaaagattagcaacggagctgcaagcgaggagaaaagacttacattgatatatccccatacattctcccgagaggggaatagcagcgacaacagccgcaataagcaatgcgcttggtgctatatatcgttagtacaatgactagatgggtcatgataatgaccgccaacgtgagccgcacagagctctagctgaacagtgcttcagtggacgggtttccactcactttctccaagaaccaaattgctaatctccgccgtgaccaggacacaagttccaaagccacttgccaccagagccaacagtatccacgcgggcgttggcaagcccgcgtaccctgcgaattcgataaatgctaacacccctgatttagtgactccagcgagcgcaccgagttgtagtgctctcgctgtcagtgggctcccattgacatgcgcggcggtcgccactgcagctggaccggcggcagcgtttactgcaatgtctagcacagccaaggcgaagaacgtccatactagagtaagggacatggtaagtattgagtggaggcatgatgaagtcacatgtaggaagtcattctgatttcctctgggtccaaaacatgacacttactgttaatagcaggatgattgagctcgtccatatccatggtgagaattgtcagaaaaaaccagattcatatactgaaatagaagcagtaacgattcacacaagtcaagatatatgcctggagaacagaatgagagtggatgtcttataagaaaatccaacttcttagccaagacctgatagataggcaagctcccccattcctcgctgccaaaagcctcgcggggtcatgtgaatgatgttataagaggctgaaaagttttaggtcccgtctctcaccgaaacaggtatatcacgaagcattaaacgaagggctgcagtaatttgatgatacaattccagattgaccaatcaagaggctcatttgccgaaactaagtccctggcgttcccaatgagtcctagcggttcctgcagtaagccgtgcgggcaccccatggggcatccgaaggcgacccaatcccagtgcgactaagaacatcttggtgggctcagccgctgccttcccgtattcaatcccttgaagaatgatgatttgggctggtcatcgcaggagttcgtggcgcagggctactgcttagccacctacgtgtccgggcaaatgcttttttcctttttctcactctttcgtcatgcacagcgagagagactcgaagaacgtgaaagcgataatgtatgcttgaaccgagactaagatatagagcgtctcccccctccgctcagatcgtttcgcttgaataatcattgcaacgatctttgtgtgccacccaggatgagttcaacagcatgtatcatccaggctaaccccgatgtatctggggccggagtaagtcatttctcatgccgtcattctcctccatttagctcctaccgtgagcaaaagaacacccagctaaaccatcacctgcagatccgtatatcgatttacaccctctgcctaggcgggtcgatcgttagctatctactccgcgtatttgccccaggcgaagaccaagaagagttctcgcgaggcgtgtgctccgccctcggcttgcaaggcctagccctcctctgcacagcgatttaccagacagtgcggggcgacctaacactcttccacgcgatatgtgtcgtgcaccttctcgccatacttggcatggatttggtgagcaaaggccggtatgaaggtctcggtccatggcggctatatttcttctccgccatccagattttggttttggcggctttcctcgctttgaatgtctatgtttgggtgacggcgccgcaatttggcagccagcccctgtgcaacaaggacacggtttatgtggtctttggagttagcatcaaagctacgtctcccgtattccggtatatcattctcggaacattgggtgcggttgtagctggctatgctcttgttttcacttgtatcttaccgtgtctgtgtgggtacgctgcgtaccgaagacggcatcccgacgctggaaacaggattgagggccagaagagaggctggatgaattggtttatggaggttaatcatcctatttaccaggatcatcccgagccacccgagaggctgcatggccaggcgctgctcaactttacgctgaacaaggtcgcgtattgttcgttctgcatatacttgattgtgtcgctggagcagactatccatcggaataacctcgaccccgaagagaaaggatggacgtttggacaggttattgcgattttcttgttgttaggtgtcgccaatgagctgctcaatgttcttattgcgagttgggataggaggcaggctgaaggtgctcagcagctggtgcaatttaggccgggtactgggaactcggtgcattcctcatcttcttgatatgttcatgtccgttacaccgccgtgcaacaagacgctcataatattgctgatatctgaaagatcatgaagccacgttttggatcatacgagtgtttcttagcaattgccgtgagctccgatctcgcctgtaactttaaattgccatggtcagtatacaagaggtgaatatttgtgtcaccacatactcctaaggtggaagcctgctgctcaatgatgccaacggaaggttgttaaggctagaattcgaatgtgctgaggtcgaagtgaccccggccccgggcagttattcttaaaagggaaggcgcgctgtgatgcagagccaattcgttgtatgacatcgactaatttgtgcaggacacgatatatattctatttacaaacccgagggtgtcaatccaaagatgaaagatcccaaccaagaagcgtccacctggcggctcactaaatgttaaacatctaaccagtttgcgctcatttcatagtactgtcaactagctcgcggtatatcttcttgagatcggcaatatcagcgttaagttcgtcaacctgctcgctcttctcacccagcatctcaagagtggtctggtagcgctgatcaaggtcttcaagttcagcttcgagctcctccacgcgggaatacgagagctgcttctcttcgagctcacgcataaggtccacaacctgttgccgggcctcgtcgcgctgggtcgtcacgcgggccagctcgtccttggagccggcgcgctcgctctctaggcggcggaccgtggcactcatgcgctcgaccagctgcacagaagggcccgcgccgacagttgactcggaaattatgtcgttgataccgcgggatggaggtgcatgggtgccgccgtacgccgaaggagtgacaggagtgccagattcaaaatactcctccggctcaaaggtgatggagggcgctgccatgaatgacggattggtgttgatgtgtgggggagagagcgtggcttgggtgattgaagcagggtaggagttttggcgaggcggcgtaccaatttccggtgaggtgaaagccatagtagatgagcgccggctaggagggcggaagtccgatggccctggggtcatggcggcgtcgagagtgctcgaacgccgtaaagatgcaacaggtgatactccgcgtagttgcgacggggaattcacttgctctctccacttggcccgctcctcctcgagcttctgcgcccaagttgagtcgcatgttttcttctgctcggccatgtccttttgcgttgaggcgagggcctctgtcgctttctcgagtttgtgttgcagcttctgcagctcttccatgcgttcctcgagcttgctgctcaaatcgtgctcggcttctttggcgttatctagttcctcttcgaacttctttaatttctggttctacggtgatgtcggttagtcccgtgttacaccaatgcatggaactttgtcttaccatctctcgaatcttcttgcgaaggtcagcctcacgtcgcccagcatcatcgcgttctttctctacgctagccagacgtgatagcaaagatccttctagtgtatgccaatttccacttgcagcagcatattgtgtttgcaaggtctcgatctgacggagaagtttggcttgggtctctccagttgcccccgatgaagcttcctctgcgcgggagcgaagagtttccatcttactttccaagacagactgttcgcctttcaattcagcctcgagcattcgggccctctctttctcttgctccaccttctccttcaactcagtaatttccctcttggatttctcttcagtgatgtcgcgctcgatcttcaaattgcatagctcctcgtctagttctgtcgcccgctgcctctccagctctagagcgtcagaattcgcttttgtctcggcggtttcggcacgggaaacggcccgactcaattgcgatttcatctcttgcacagtctggctgagcgcattgcgttcattggtaacagcttctaagtccttagtcgacttggtctgagatgacaaagactcggttgccctcttctctgcggcctctgcccgcttggctcttgcttcggagttgactaagtctcgctcaagcttgtccgtctttctcttcatttcaatctgagatttggtgttttcagtaagttgctggcgcaatttcttgattaccgttcggtggtccatttccgacttagacagcttctgcccttcctctagaagcaatgcgatcttctcatctttctctaggagttgtttttgcgcactccccggggtagcatttgctgctgcatttttagccgattccgcagcatccttagcgaggtatttcaatttcgactgtaatgcatcaatacgttcaatataaccatgcatttcttcctgccattgggactcggcagtcttatgttcagccttcagacgagcgatatccgggttttcattctcctctggtacctcgggcgattcaacgctaacccgcggactatcacccaaaccaatatcactcaataccgaattgcgttgcaaatccgaaatttcttgactggctttggccgagtcggttgaggattgagccacctctacagagatcctgggcgcggagtctgcgacgctgatgtctgttgaaacacgcggtgatattccggagtcgtagcttatcctcggtgaggctaatttatctgcaatgctgtcgtcatttggtcgcgagatctcggagtcttccaccgcactattcaccgatgcaacgctggaatcaatgtccatacttgaccgaggttcattgctaggtactgggctagcaggcggtgatgagactcggctttgaggagaatgggaagagagattcgaggcattctgtttcaccatagctcgggctagacgttcctgaagccggtcatttcttcgcgcggtcgatgaactgcgggataccgctgaaagatgttagccagctcgactgaatcgcacatttactgaggatttcatacaagaagcaggagcctttgtcagtggtgcatctccgccctgaatttcagtgggctttgcagtagagttggtctggtttccctcctcatccatcaagatgagatccagccgagactcgacgccggctactgcctgctggaaaaaagaacccactccccattttggcttttgtgcctgcgagttctgtgccattgtggcagaattactgtactggatatcgcgaacaggctgctaagcggcaaatgcctcgtgtcgcattcgcatggattcggtgggggctgcgctcggacgtcgacttgcgattatcgtggggaacgttgcaaaatttcagaatcaaggcgacaatgattttgctagaagtattgaagcctaggcggcaatggcaaggacttgccgcgagggcgaatgagggagactggcaggattaagccggattcgaagtactaggcgggaatgcaaacaaagattaagacgctggtccgataagacagtaagaacaaggcaaattatcggcagaagagtctatagaaacaagaaagacgatagagaaataagacgcgagaaaaaaaatagagaacagaagacaagttgaggctatgcattgagataccgtaggtcttggcgcgggcttccgtcatccccaagctcccccgtctctctggacacacctcgagtttgtaccattcacagccagcgacgctcatttttctggctcaaaaaccccccagattacacccacaatgtcactggagccacccacctacctcagctccctccagaataacatccgagctcggccaattccgtgggagggtgccgtccgggcgggcaacatcaccgatgaccacttgaagaagatcaaggcggtggataaggtgcgcaaggagcaacgccgtcagacgatagaaggagatcttgctggatacacagatctgttggccggcggtgcacacggaaagagtgtcttggactcggcctcgagaaggaccgatattgtgcagtatatactggtgctggcctcggacttgattcaaggtataacctactagcggagctgaagttctgaggaatcatactgactcatattaaaaaagatgtgcctgctttggccaactcgcttgtttctcaccccgaaccgtacaagcccttcctaccattcttgcagcactcggcaaacgccgaagaccccattcctctgctcacgtccaccttcctcacggcgctcgtgtcgcacagtctcgttgcctcatctaaacctgcaccccgcgacaatgaggctcttccacagctctacacctatctctctaccttgaccaagaatcaggatagtggactccaggatattggtgtccaaggattctctgagctgctaagaacaagccgagcccgagaaatcttttgggagcaacgtcaagagaccttgacccccttgatcgacactcttcgagctgcggcgggtgctaaagacaacgtcagtaacgcaagcacactgggaagcagcactcgcagcgtcgagcctggtctcgccggtggtattggccttcagcttctatatcgggtgctccttgttctatggcagcttgcgtttgaaggcgctctcgttggtgatgaacttcaagagtgagtgatgtgaagacaagagatcgaatatacactctgagctactaaccccacacaggaactatgaaattatccaactgtacatccaccttctgcgtctctcaccgaaagaaaagaccactcggttgcttgttgcaactctgtacagtctttgctccagcaaccggacaactctgctacccatcgccgtgttccttcgactgcccgccctcctgactaacttgtctggtcgtcatctgaccgatcccgacctgctcgaagatctcaacgcactctcttccatgctggaggagtacaccaagacacagaccacctttgacgaatatgccgccgaagttcagactggccacctccgctggtcgccccctcacaagaacccgaccttctggaaagataacgctcgacgaattgttgaggagtcgaacggcgctttgcccaagaaactggccgagatcctatctaagagttgggataacgacaagcaggtactggctattgcttgcagcgacgtaggtaacttagtgaaggaggttcccgaacgccgtgggcagttggagcgactaggcctaaagacgcgggtgatggaactgatggttgatcaagatgaatcagtacggtgggagagcttgcacgctgtcggcgaatggcttcgatatacctttgagggctgatccatcaaagaggactttcccgatatgttgatgggcttaccaggatggacatatactctggttggcatgtactgtgtattttcttgccatggcgcatactcgcttctttttttccgggggagaatattagaatcatacttatctatgaaattcatggcccctatattctgatacatattccagtactctaaacggtggatattgcggtcggccgctaaagaaccccagacctgcaaacacgctgcgacaagacaagagcaggaccctcgatctctctctataggatctaatatcatgacttcaacccctatcgctgttccctagagattatagattacattcgccacgcgggcggcttatcggagagctttccattcccccgcaggaattcttcgccgagaacatcatccaaccgttcaaaatccacagcacccatgtcgagatccttcacaggttgcaagagatgtaaggcacgccgacaaaaatgtgacgagctgagaccgaactgcgggcgctgccagactgcaggcgagcaatgccaatatgcaatgcagttgcagtggggtggacgggcattctcgcgatcccggtttggtgcttgcgtcgggacaggaggcatgcagagactcggtatgtctttataacagagggaccttgtacatagttctgactatcccagaatattcaccaggagagttcatctacaccaccaagacggcggtgcagtcagccagcgccaaaaccggatcagatctcaccctatcgcaacccgtcgatcccttctcgtccttgtcgtccagtcaaaaggccttgttgcatcattttatcaacgatgcctcccaaatcaccgcatgccattcgggaatgcagcaggacataactcgcatgctgatcccaatggctcttcagacaccttctttactctacgctaccaccgccttatcggcgatccatattcaagccctacacaaccagtcggagaccgtaaagtcagcaccggatattgcccgcttaatggctctcagtcttgaacatttccgaacagaactgcagaatccctcatccaaggatcccgaggcgttggtggccacggctcggacgctctgtctagctgagatccattctggggcgatcaacccgaactcatggagagcacatgttgacggggcgagggcattgatgagggcatctgacgccgctggcgaagattccctgcggtctacaagcggtttccggcgatatttggatcgttggtactggtcgatcgtgtcgcttacggcactgacgggcaatggtccacccattggcgatatctctgactttgtctcatctgacttgatggggttgggtgggtccactgattatttagatgactattggggtttcagtgtagaccttgcggctgtctttaggcaaatcggcgctgccgcttggcgaagccatcaagtcgagaaggctacccagggctttgttgcaggagaggttgatgacagtgttgagaatgatgccgcgtccttggagttcgcaattcgacaactcatgaatcgtgactctagctcgcagccctctttttaccctagagccgctgaaggcttatctgcagagaccgcgcagcagctcctgctatgcaatgaggcattccaacatagtgcgcttattcagatccatcgaagacttcggaaaacaccaactacatcgccagaagtgcagcagtcggtccgacgtatcctagagtgcaccgcgcagattgggccatcatcaggtctctcgccttgggtgatgctaacgacaccaatctttattgcgggctgcgaggcgcgcggtcaagatcgagatacagtcaggcaattactgtcgtcgttgcatgacactatccgcgtcccgaacgttctccagtcactaagattcctcgagcagtattggtctaaccaactcagcgaggaagaagactggagccatttcctcggtaaggttttctcttagccgtttctttgttcatgctaacatccgatagaacgaatgcagttcgatttcatcccttactaaggagatcaggccagagcctgttatgcctcacgtgcaatgattcatgtttttgagcttgggtactatcttctttcgttacactataacttttcgtgtgagcaaatcggtgttggcaggggttttggcgagcgcatgtacctattaagccatggagtttggaagtggcaatattgtttttaagcaattgtacatgaaatgtctttgttctttcgaagctaacactttttattgggctcgcctatatttaaatatctgagtattagttcgaccaaggaattgaccacatggatattgaagtaaaaggcgccaagcctaggagatatatagacggaactaagcagctaatctccgcattcggacataacaaccaaatgacgcgatgagtcaaaaatgataacattggaagctggtttgcatcatcgaatctcaaagcttcatgatcccgagtctagataggtcagatatagcatattctaaccttatacgggtcggagtcgggtcaactcatatacgaaaccccgggatggcgtctacgagccattatgattcgcgtagactcgaacctacactccatggatcgtataaccttagcattataagattacctatcaatagatgcgttcgaattctttgaaatcaagtattctgattcctaatacacaaactttagtcattcaaattcaaattcgaaaacgtagtggtgcttgggaagtatatagtctgttataactacctctcaataggagcttgatttgacagtatctcatctcgttcggtcccacgaacctaagggtgtctttctcgtccttatccaatggaatctgtcattcgagaggccccattcgggcagcttgttcgtctcttgacgaacaataaatactttcaataccccgaagaaaagcccgacttcaagcttcccgacacatggcttcagttgttgaactctagggatgaaggtaaacaaaagaacgccatccggcatgactccaaccgaagccatgaacacagtgagcccctaagccggtcctctacccaggcatccatgcaattcaccgaagctcgcctcgaggccgacgaagaacatgaaatcgagaaagtcgaatccatccccatcgcccccaagagaacaaaagacggttctatcctcgttgattggtattataccgatgattcggagaatccacacaactggtccaacctcaagcgcgctctcatcactatagtgatctgtctatatacctttgtcgtgtataccacttctgcgatttacacgtcctcaacagaaggtgtcatgaatgagtttggtgtgagcacattggttgctactttgggtctgtcactctatgttctagggtatggtaccgggccattgatcttctctccactgagtgaaatccccgtgattggacgtaatccagtctacatcgtcacgatgttccttttcgtgataatctccatcccaacagcttttgtgggcaacttcgccggcctgatggtgctgcgatttctgcaaggtttctttggctcgccctgtctcgcatctggaggtgcttctatcggagatatgtatagcctaatgtccctgccttatgccatgatggcttgggtttctgcggcatactgtggacgtaagtttccttcccgtttatatatcgttatatacaccaaataacgttacctatactaacactatacagccgctctcggccctcttctcagcggctttgccgtcccagccaaaggctggcgttggtccctcttcgaatcaatctgggcctccgccccggttttcatcctgatgtttattttcctcccggagaccagcagcgcaacaatactactccgacgcgctggccgtctacgcaaaatccacaataatagccgcttcatgtcgcagtccgaactcaaccagcgcaatatgcatatctcagacattgccatcgacgctctgatcaagcccctggaaataaccatcaaagatcccgccgtcctcttcgtccagatctacacagccatcatctatggcatctactactctttcttcgaggtcttccccctcgtgtatccagccgactacaacatgaacctcggccagatcggtctagtcttcctatgtatcatggtctcatgcattatcggtattgccgcctacgcgagctacatccacttctggatgcaccgtcgcatccgccgctccggcttccccgtaaatgaggctcttcttatccccgcgctgcctgcctcttttggtcctctgattggccttttcttattcgcctggacggctcgtgcgtctattcactggattgtccccaccatcggtatcactatctatggtgccacggttttcgtcgtcatgcaatgcatcttcatgtatattcctctcacctaccccaggtacgcggctagtctattcgctgcgaatgatttcttccgcagtgcacttgcatgtggcagtgtgctgtttgcgcatccgctctttgggaatctgggcgttgctcgaggtgtcagtcttcttggtggactgagtgttatcggtattatcggtatttggttgctttacttctatggtagtaggcttcgtgctttgagcaaatttgcgatctcggatgaggttgaatgattaccttgtggtttaatcacgatttttgacgaaaagttattgcaggatatttgttgatagcgatatacggaaattgttggagaggatgagacaaagagcgacgttacattaacgatgaacgtgaatctcgattctcgtcatgaataatgagaatcttaatatttaatactgtgaggagctctttgtctcttgaataaatattgttaagcctcatagaaagatgagagaagttgatccggatcataatatcctcaagctcaccaattacgagataccctcatcgttatttctgtgcacgcctgtttgcaatgaatggcgctagctattctacctgaaaagtcagtgattaccaaagtttaatagtattgctttttctatgaataggttggcactagtaggaccaattgttggcacagaaatatattattaaaaacgcgtgactttgaatagattattccagaaagatcatttgaaaccataattggtgttaccaatcttcaacttgggtttacccacagagagaagtgatatcctcagggacgtaggtgctcatgatagaaataagcttcgagagagggacccagtcaagaagaccgtggatgcttcgtacgggatggccactatacaggacccgggcgtagaaagactttgaacccttcctatctttcgtctccctgtaaaactgttagagaattcccgtattagaaaacagtctgacttaccaaatttcgaaagcaatgttggatgccatagcaggccagcgaagcgcctcgattcccaaagaaccgaggataggaccaatatctccatcatgaataaaggtgtggctgtaatcaagggaagactttccgctcaggacagcctgcagacgagaaacgatctcgccaataaacaagccctcgacaagctggatgtacttgactacatccgggttcgtgcgccagtagtagttccactcccaatcaccggcacggaagacctcctgagccatctgcttcgtgacacaggttgagggatctgacagactgcagggcaactcatagccattgcaaagacggccctggaagttatccgaaaagtggtcaaaggtattctgccacgaactatctgtcgcgcccaacatagagccgagcttcgagcgcaactccgcggtaacattcatatgctccttccactgtgtggtagactgcagactagacagagtagagctgatagcagagcaggagtatccctcgttgacagtatcaacggatgaaaccatttggtgcaggggcagggctccctcgtagtgaggccacatgccacgcaggaccgcgccagccgaagcttgggtgagaacggactcgctggagcggaaccagactcggttgtttggcttggcagggatcaaaccaagcttcttgccgtagacagaccacaggtccttgccgtgctgatatccgtcctggactcctccgatggtgatctgagggtactgacaggtgccgttcacgccggctgagaaggggttggtggggtcctggtatgtctgcgcatacattggcatgggctggatgccgcttgcgctgttagggcctgcgtagagatacgggcgcacattgtcgcagtgatactcttggttctgggaaggggttagcttaggcttagagtcgatctgagagttgcttacctccccacctgggagaatgttgtacggagttcgtcgctggtgacgctgcagatactccaggtacaccagctttcccttagttgaccccttggttagagcttcgggcagttcatattccgctgaacgagggtgcggcatcgaacagtagtcatagatgccgtaggggctgcccccggtcggtccattggttggagcttcatagataccaccatatgtcccaattgagctgtcgctgatgtatgacgtatcattcagcgttgggggatagaaggtgtccaccggggtgtgacccagcacagaggctgccacagaaagcaagacgaagctgcgcatgatggagatgggcttgagtgaggagaaccaagactggcgaaggccttcaaatatatagatttccgaagccatcaccaccaggcccaaactgataaacaagatgaagccccaccgcattggaaccagtggagattggaaaatcggcgcacgtgggatcggcaggccaacctgagaggtgctagcaaccacgtggctcggcatatagtatataaccaactttcggctaaacgattgttctcaacgtcgtgtcgtccgatcgagatgcaatttcccgatgtttccgatttcgggtctcggcattacccctgcataatcctgccgatatcagatgcttagcaaaaactatataacactatatattccagtccctttgatcaggatatttgattatcggtcgactcatctctcacttttacaatgatgtggaaggcttcccttgttatggccatggccatcccgctggcgtccgccgccctggcggattacgcactgcatacagtccttgacaatgctgctccgatctttggatcgtacaaaaaggtcacagggggaaagtcggaatggatgaagaaatatcacgacaacactttgctcgttcatatgaacatccccggcacccacgacagcgccacgggaagttacaaccaggcgacgcaagatgcccttcggggcattacagatctcaaccaggtcgttgttccggtgccagaggcattgacgtgccaggatgtgaatttcatcaacatgctcgacatgggaatccgggcatttgatctgcgatatgctttcgatccaacaaacaccactctcatcttctatcatgcacaggccctgctgtcggagaaagctagtgtcaatgatgtgctctttggcttttacaagtggctggatgatcacccctcggagaccattttcctgtcattccagtaccagggctcgacagctctgtacgccgaaaacaacgcggctgtgcagttggagctcttcaataccctcaccagccccgcagcgcgccattatttcaagcaaacgaaggatgaattgggtaccttgggcgacgcacgtggcaaaattactctcatgcgccgtttcgacctggaccagcttccggataactacacagccgcacttcccggcctgcacttctcgcccaatctctggaatgataacggcgccgccatcgacctggtgtacaactcggacaagaacttgaccgcctacatcgaggactactaccagccgctcacgcccactgggtccagtgcggttgagaacatcaggtggaagtacaacgccacgacggaaaacatccacaaagccactacccagcacccgaacagtctcttctggacatgggcgtctagtaacaatatcgtcaacaaccctcccgattggcctcggatcatggcacttggaaacggcacccactatacaccagctggtggagttaaccagcagctagtgcctttcctgaagaagcagaaaggcaagcgtgtgggaatcgtgatgtttgatttctttgagcagccctccaacctggttgatacgcttttggatttgtgaaatacaagatgagcgagatgttgttaggagaatagtcaatgaccaagcttaaccttgggatcaatagattgaacaatgtggagccgaatagattacttaaactttcctcgtctatctgtgctataaactccacaattaaaactggatattccaagacccatcgctcgcatcacgcacgtggacacgcccccatcaggtttccctacccgcacgacccttcccaaggaacaatcaaattgcaatgccaatcaaatccgatacaatgcccttgtcctccgctgacgtcaagctctcaactaggcttgcccagcttggtatattgatactgcgcccagtgaggaaccccatcttccaagtttcccacttagtcgtatccaaagagcacatgaggctagcacaacgggcgaattcatgtttctccagaatgtcctcctggtcaaggcagatgcatctccacgcatcatccaccttatacacataatcccagatatcataacattggctgtatttgattttttgcaactcaagccagccagatcgcaccaaactccaatcagaaggtttgcagtgcttctccagcttctcccacatctgctgtgggtttcgaatgttgcgaacaatcagcctggtcgtggcagataggtttgtattaatgatttcccgcgccgcctcatgcaggctgtctaattggggttccaagtgatgtgcttgagaaagttggccgattttgccctcaaccaaatccaaaagaaaattgcggctcagaatatgcctcattttgcggctccaggcgcggtagtcggagcggccgcgcaaagggggacaatcgcattctattgggaaattatcatcaccgaatgcatttcttaagatgaaggtacgttcgatcaaggtctctgcttcggtaatctgtcggtcgctggggctttcgggtgcgacagtcatctcagtggaaatctgctcggcggaattgacccggcgtctttttgcgggcgaggttgaaggttcatctcccggaggtccttgtccagagagggatcgtttcgtcaatggtgttgaggaggccatgctgtttattcttgacgcgcagacctagcttggtggataggaattctcaacacagcaggtcaggacagggcaatgataatcgataaggaatgctgtgaattttcataggataagtattgaaatattgaggtatgacataggtaactatcaccacgtcgagcaaggagaccaccgtttatatgtacctagcccgacgccagaaatattcacttccagaaaactgtttgctcaaatatgcagccctacattctttggaaaatccagaaacttgacattttagacataattcccccttttcaacttctctggatagcacctaccgcatgtgctatcgagtctctcgtggcaaggtaacagctcgagtaactccgttgtattatagggcacaaagaggatcgatttcgtagatgtaccaaaagctccaaagaccgtgcttgttctttcttccctgtactcacatacattccgcacaacttctcagaactctaaacctctctcactgaatacctacctcggcttgaaaggccagaatgccagcaactgcaacgtctacaaatgcaaaaggaggagcaaaaatagtactcgccgcgctaccagccccgcttgatgctgaggtagctgtagatgtactctaagctgatataccgcttgaactagtggaagtaatgccggtggaccctataggagataggagagttacaggtaaaattcgatgtcatgaggcagaggtcacggttggtgtagttggtggtagaatttgacccatcatgttgctcgtcatcgtgatgttattgaggaagcgcatgagtgcgttcctgtcatggcaagagcgatggaacaagagagatgaagagtgtaaaaatggaaagagcgttcgatgaaaagcaggcgaaaatttttgaagctagcatatgatctacatcatgatggccataatcgctcatgtgtcatttggtagaaaaagtatatctcattgagtttcagaaacaagggctatgtaatgcttgacccagggcatgatcttatctgacttggcacatcagtgaggtgggccgatcacaataaagcggagagaaaaggcaccaaaatcgggcaatattgtggggtggatgacaaatgctgccggagtagcctcggctcgtcatgacgtcatcgagagagggccgtagctccaacgaagataaaataccgccagtctgcttgttggaagtccacgccgcaatcaaagtcgtctgattgattgggtcaccttataataaatattaacgtataatagaccagcaaaagaaaatgcccccccctcgcaaagctctcattgcaatcacctccgctcatgctcctctgtacccggagggcaaagagactggtaagcctctacttcgaaagacagctcaagatcagaaataacggcaacttgacttaggcttgtttatcactgaagctttgcaccctttccttgtcttcaagaaggcaggattcgatgtcgatctagtgtcggagaccggatcttaccaacccgactggctctcgcagcagaaggactggcttaacgatgaagacaaagctatctgggaggatcactccagtgaattccgctctaagcttgatgatctcttgaaaccgagtgatatcaattccagcaacgtaagtctcctttacggatacttggaacccgagctgagcattactaaatcagtatggcctatttttcgcttcggctggtcatgcctctttgatcgactacccagaagccaaggggctacagagcattgtatctaagatgaacaccgacggtgctatcatctctgctgtgtatgggtaactgcacctccgagctaaacatatttctaattctgattaggtgccatggcggtgcaattttcccaggaatcattgatcccagtacaggaaagtcgattatcgctaaccgaagagtgactggcttcactactcagggagaggaggaagaaggtgttctagacaccatcaaaagctggaaccggcccaccattgaggcctccgctgcaagctcgggagccacatgtgagttcgatgtccaaacgtcgattttttgtatgtctgacacgacattagatgtctctcctcctggcccttgggacgctttcactatcaccgatgggcgcctcgtgactggtgccaatcccgcaagtgcgcatgtgacggctgaagctgcggtgaatgcgtttgatgctatctaaagcctagatcacttgggaaacgcaggatgccctctgttacccaggtagtaatagcaaatatagtatcatccattctcattacagatcccagctatatcgtaggtgtatattaacttcacggtagctttgagcgttcaaaagcctcatcggttttggaagtggacaccaactcgcgcgaagaacctggatatgtgtgaaccacaaaagtgagatagttatgtagttcacccccaacaaatcgcttagtggttcacatgtcttcgcgagttggtgtccttttcgttcttggtcttcgaaaagatatggtgattatgaacagcaatctggtcagccgtgatgaattaaaactagatgcaaatgtatcactgaagatgtatggaggaggatgatagaggaaagggaaaggtgggtcttgttgtggggctgctttaggggtagtactaagccttcttaaggttgtataaactacgtaaaaagaagatatccataaaaggtacatttaagaagaccattgaaatgactactgaagccatgttatgccttcagttattcctatatatatcgaaaaaatgatttctacattcgaccaatatgattttaaatgatatgatacgaaagggctcaagctagatcaagacagacatagcatgaacgaagtgcaaccaccgggacctactctctgtcctggtatttttggcagcaatgagaaaaatattgattggcaaatctggaagacaactaaggcttgatctgctcactaaaatttggaataaatgctctgacatcatacaagtttggaagtttggaagcttgatagtgaaatgcgggaagctggacacactgaggtatagcatttccgttgtagttttgagttttgcgagctacctaatcctctccataaaatatcaaggaagttcaattccttctttctctgctgtctgtaagatgtattgcttgacctggataaacacaacataaattagccattctaatccaagtggatacttatttatggcgaggtgcttaccttatcatctgggactagctgaatcgccagtcgaccttcattgtctctttttgccgcctctgctcctgacttcaacaaaaagatcgcagcgggcccatgtccttcagagatagcgtgatgaagtgccgttaatccgtcaccatccgttgcattgacaggactcttaccctcttccaagaggagcttcaagataggcacagaccctactgcggctgctctgtggaggggcagttggccacgtttatccttgactctggcgctgcatttattggcaagcaaggtgcggacggtggaaagattggccttggaactggcgaaatgcagcgcattctactagatggtaagttcatgtacatccagtagccaaattcgggtctcagaaagctgacctgtccagtgtgacttttgatagaaacatcggctccttttcgcagtaataggtcgatcgttgcgtcgcctgcggcatctttcaggctagctgcaatcatcagaggcgtccagccggatccatcctatgctgatttagcaagtttatatgacgatggctagtcaattttgaaaaggcttgggcattcttttcgaagacagaatagcgatactcacttctacgtctgggtcgaagtccttcatagcgactagcaattccacgaccgggtgtcggttgtaggccacagcccagtggattggaagacgctcatcgtcatctttcacgtatgcggattttgggtttgcctgtttcgatgattagccttgttctgggagatcgaacagtaccagctcgagcttgatgttgcggggcagcctcggccctaggtggagcacaactcacattgagcaacgactcgacaacctcatctaaagaaatcagattagtgcttatttaatacaaagaagggtcaaactctcacttcttccttctcgggcagcctcgtgcagagggaatttctgatcggaatccatgacgactttggaggaagaagagtaatattacgataagagctccgataagccgggcggctgagtcagtaatattgagcctcgtgatctcccgaagagggtaaaatttggccaaaatgaatgtaggtatcaatttactgctctaaaaagattgagtagagaatatattcagttggagggcgcatttgactcatgtagccgtcgttatatatttggtaaatcaggctagaacgggaactagcagttacaagattcgctacaaagtaggtaaaccccacaacccacaacccaacaggctattattattgttataacttgttataaatggtcttatgaaagctcattaatgaagatattcatatgtctttcaataattaagaactgattatctgaataagaacacccggttcaccgccctctaacctcaccgcccgttttagccggatataattgttggccaattatggcgcctcaggcacgaacatccgttgcaacttcgatccaaagattcatgcacgtccttgtaccatcttcaaccatatcttgtctcgcagctactagagacgcagcgtcggtattctaattcaatcaactgcacttttagaacaagtgccgagactgaccctccggactcgattgcagtcacgaactagccacaggcttttttcatcgcgcgcaccatcgaagtgtgattctttggagctctcatccttcaaagcagaccgatttatctcacccccccccacatcagttctttgcacacacaaaatggactacagcgcaccccattccgccgatgatgccgtgcgcatgtccgcgaagcggaccgccgaactcttcggtgccgaatacctgatggtcacaccttcaaccctcacagacggctcaattggcgtttcctaccgacggaaggcggagtatgaagatattaccgagctaccacgatctctcgccgagaaacaggcgaaagcttcagccggtcggacaaaacggccgaggattcaggcgcagacacccgcagacggtagtggctcatccatgtcacttgtgaggcggccatcgggcacgggagtaggagctgaggaccagcctaagagtttggttcagagaccgtcagccaccaagcaacagcggcccgagtggcacgcgccttggaagctgatgcgcgttatttccggacatttgggatgggtgcgggctttggcagtggaaccaaacaatcagtggtttgctagtggagcaggagatcgcacaatcaagatttggagtttggcgacgggcgcattgcgactcactctcactggccacatctccaccgttcgtggcttagcagtgtcaccccggcacccgtaccttttttcatgcggtgaggataagatggtcaagtgttgggatctggagacaaacaaggtcattcgacactaccacggtcacctcagcggtgtatacacacttgcccttcaccctcgtctggatctgttagtcacaggaggtcgtgatggcgtgtgccgagtctgggatatgcggacgcgcagcaacgtacacgttctcagtggacacaaaggcactgtcgccgatatcaagtgccaagacgccgaccctcagattatctccggctcgctggactccacagtccggttatgggatttggccgctggcaagagcatgggcgttctgacacaccacaaaaagggtgttcgcaacatcgccatccacccctccgaatttacatttgccagtgccagtaccggcagtatcaagcagtggatgtgccccaggggcgatttcatgcaaaacttcgaaggtcagaactctgtcatcaactctctgtctgtcaacgacgagaatgttctcttctctggtggtgacgatggttccatgtccttctgggattggaagactggtcaccgcttccagtctacggaaaccactgcacagcccggctctcttgaagccgaagccggtatcatggcttctaccttcgatcgtactggcttgcgtcttatcacgggcgaagcggataagaccatcaaggtctggaagcaggacgaagacgctacgccggagactcaccctctgacctgggcccccactctcggtcgacagcggtactagagggatgaccagcatcactggcattcgtaccctccgttccgatttctcaataccctgtatttattttccttttttgccatcaagtttttatcggcaccatgcggagttaagcgcggtctggaagatctttgatcttaaaatattcaaacatgtaaccatcgggacaaatttcctcggaacggtttgtttcatgctctgaaagaaagagtcatagagttttgtatgatacaaaccccaattgagccaaacgatacccttgacaatcgaccctgctagacaacacgtacaagtagcctctacggtctagagtacagaagacacagctggactgaacgggtatcatatgcaaactatattacactaactctggataatgcgtatcgtatcaaaaatccccaaagacaagcctgaccatcaccgctcaatacccaaaccaaagcccttagcctccgcatcctccctgaaagcggacctgacatcttccgctgcaactctgagccgaactttactactccggtcgccgcgagtggggatcgtagtacccccgagcacgcttttagagccagagccttgctccagtgccaggacacccgagttcatgagcaacatagctgcatagcccaggctccgcacgcgagcagtggggcctccgcccagtaggaaatctttcacgccggcgcctgcggctccagcaatggcgacggctgcatcggcgatgcggcgggcttcgtcaaggacgtcgccaaatgtagattccgaaatgccagttcggtggacgcgggctagtagggcagcgaggaagagcttccctgacagcgggaggcagcgcaatgattgttggagtggagttgatgtagcttcgtgaatagcttgcttgatagtggcgatagtgacgcgccccggctgaccctttgcaggaggtttagcgatggttgattctccggctgctttgactgcgacagccttgttacgccggccgggggttttgctgggcgtaggaggcaatgattctgtctcgtctttggcctcatccgcggcagccgcctcatcggctgcttgctcggcgatttcaacggcccgacggcagatgtctaaggctcgtcgagcatcgccactgacagcggctactttgcgacttgcgaattgaacggcgtctgggtcaacgatattgcccggtacactggccaggcgggtactgatgatttccattagatctgtgtgacggtatcccgggaatgtgatacgggttaaaccgagacgactggatattttgttgcttagggttctttcagggagatccatggtgtttgcaacagccaggacaatgaggcgcgaatggcggagagcaggccagttgaagaagttatacatgacagactgattctttgtgacaagctgatccaattcgtccatgagcacaacgcaggagactcgacgaggggagggatttgagaattctctttcgagaagatccaatgcgtgggaaggtgatactcggtcgcccttcaaggcttcccatagtaaggagtaggattgatgcgggtccgtgactttcatgccgttaatctcgacaaagatgaaatcgtccatctcttctgcatgcacggcaccgtttagctgcgcaaccacctcacgcactgtggcagtcttgccagtgcccggagtaccagagatatagatacaagcgcctgtgccttccatgatcgcagcgctaagatggttgtatacagtgttgaactcggtcttccggcacggtaatgagtctggaacagtggagacgtgtagtaaattccgagcctgacggtaaggagagtcaaaatgcgtgggtgagaggacacgggtacccagaggagtaaactcaagtggtttttttacgacaatcctgatacatgttagtcttattttatgacacacattcaatctcgctgtttcctaccgtttatgggttggggtcatcagggccttctttcgctgtgattgtggcgtggcattcgttgctgctagtcgttgtttctttctcggggtcgcaggcaccgtgatctctttggtatcgacatactgtaatggtccaaatcagcgctggtttgcagttggaaccgtgtggtttaactcacttcatcgtccgcagccttgcgtttcctggaagccttcaagccatccctgacccagctgatcagatcttggatgttgttttcgttgtacatctcctcccagacaaactcctcggtgtaccgtccttgaacctggttcacgcctcgtcgacagacaatgcacttgttatattccgccaattcagtcttgttctttggaggtccattcgggtatttggcattgaagatactctgagacatgactgcccccttcccgctgattgatgtcaaggggttgctgttgaaatcgagtgtgatgtactgttcgttgggcaaggcatcggtcctgcgcttgttcctcgtgcccataaattcgtcgggggatgcgaaccacataatattggcggatttgacaacctcgtcttcttgatcttcatcctcctcctccaaaaattccgtaataatgccaacccagtcctttccagcttcaggggatttcaaaagaatcacatcaccgactttgcattggaattgacccatgtgtgcgccaatgattttgcgtttttggcgcgctggacgggatcgtcttcggctgcgtttcgccggggtatcatggttggcctcggtctcttgggtagtttcctcagttgtgtcgtaaatccactcccatggaaggtcctcgacgcctagttcatcatcagagtcgtctcgaaccagagctcccttggtcatccattgggcgcgttcacgggcactgcgcctttgaggcgaagagtctgaatcgctatcgctcatttggggtgtgggagatatgacgggcagaatgcaacaacagagaaggagaaatcgcgcttgacgcgttgtccactttcgtcccttttaggtttagtctgacaaggaggtctagccaatcaaatccatatattgctaccttatagtaaaacatggagtagagtaaagtgcaggtatagactatacatagtatgtgaatatacaatatttcttcaactaatcgcatacacgtggattgaaatcatctttaacttgcttcaaagacatcactcagtatattgtcaaactactttttgaagtttatctactaacgccttggacatttctggaacattttgtagagccaggcttaatctccagttatgtctggcataccagaagttccctggttgatttgaaatgtcaaattaatacatcattgaaaaagtgaggttgatcacacttgccagatgcttcaagattgcggaacggatatacgagatcggagatgtcggagaaacataactccggaaccctaacaaaatccaacgacatctcagaggatcagatctatatacttcctaatgaatttgcttttacttgacttcttactactataagtgacttttataacacgaataccaacatgcaatgcacagtatgtctcttttacccttcacagccaaacaggtcggcgggaacattgatttccgagtgtcttgatctatcaatatcttcttattgtacagaaagtcaaatagtggacaagctgagatgttctctaaggtaattcatatgacctggatagtcctggggtctctagctactacgccgacgcatatgtaatcaataaccgcggccctgtggctccacctaggcaggaatccatccatggatgaatgaatgctcttactctttgataactcccacccgggcagcctctctctttccccttctggtcgcattggttaattcatatttcattcccttcctttatctttcttttacctcccacacgagtagcattccttaagttgcattccgtcgccccccagcagtcgccctggcagtcgatctttgttcagttccgttgcactttcatcgcacttccatcgaaaagtagcgaactactaatcccccctttctttcacttctgccgtttgacatttccaagataaccgcgtcaccttcttccaacttagctcattccaacaatccgtcctgtgagagatcgctacggtcatcgcacagctgtcgctatcagaccccgttgaaatggcttctctacccgagccccatgataaggagtaagtttatcttacacatggataattgcaaggatattcgctaactaattccaccagctgggagcgtaccaatgccaaatgtgagagataatttggttctcaatcatggttacacgtactgacttagatagcatgggaactaccctattatggccctggtccagatttcggccgggggaccatctacgatggggatgccgaccagaacacggataataaaagtaccgatgaggatgatgaggatgctttcgaggacattaactacgaccgccctcccgttgactatcagctgcaccctacaagttcaaaggttgctgtaactggtcgggctatctcaagtgtacctcctgtacctacgccatcgccggtcccaagtcaaagcacctttcaaacccgaccagttcctactgggtccagaacaggtcgacctcagtcaccaatggggccagtgttcaatgagcgtgggcctaataccggaatttccaatacattagcacggccgcattattcggcatgtaatctcaaaccaggtcaacgtacccctgtcaacaggggacagactgacacaccgcgaccaccgttttattccaaaaaaggcagcactacttctactccttcgcaacacaaagctaggtgtccagctatttcatcggggcaaaatgactctcattccaaggcaaagtggcgcaaggggttctctccagatggtaagtatgctcacatcaacctcaagtccaccattaacgatcaaatagcgtcttatcgtttgccatatgagtgccaagtgtttcaagagaagtgagtacatacagctttgcagtagctggtcttaaaactaacccagacattgaaggattagacaagtcactttaggagaaatttccaacgtcgacttccgtcagcggattatcgaggagacagatgcatatatgaggatgagcgcgggaaacgccaaggtccgtttttgctaaaaccctccaatatctagagactcattatactaataatcatgaagcttgttcacatctggggacggcaaaagcaggtgttggaggcccagaatttgcttcaggatatggtgaatcggttgatgcagcagcggacttcgcctacagtagcgcgctggaccaaggttcacgcgcattcaaataggaaggttgcccatgcccggtcacaagaaagccatgaggaaagattgtccgacatgcggaagcccccgagaatcaccacggattacacggtatgtataacgctcagcccgccctactttgcttccgtactctatggatactgaccgacacttgatactacagctcgctttcctctggccctcggatggcccctcactcaaccacttgatcactgcccggcgcgagctcctcgattccattcgattgagatatgacgtgaatatctacatcaagcctggtatcccagactaccttttcatgtctggaaataatgagcgggatatgtccatcattgcatcccgattccgagagctatgggagagggtaatggtccagcatgagacggaaatcaagctgttccttgttgcggcgccccgggcagagcttatgagaactcacgtcatcctgcaaaagtccggtcggctctcggtgcctgttatctgtggaccggagctggccccagatgtaaccgcaacctggaagaccactgcggatgaaatcaagctcaataacaagaacattgtcaccacccgccttaggaaagcactgcatgtgattcctcaatttcggggattcctgcaaatgcgagcaaagttcggttcgttcgccctgcaacagtggcgcaagccgaatgatggcacttcttatgagttctcagagtttcgtgagatgcttacccatatgaacaccgaaggacgtttgctcccagggtatgtgatatgtgatctccgccataatctgatgatttactgactgactgatcttttagaatccggctgcagcaagatgagatctttgaccggatcatggaatcaacctttctaaagccctggggtaaagccaaaatcaaatccctgctgagcctgatgcccaaatattccgccaactttgagtaccaagtgaacaaggattcggtaattcgcgtggaggcaaaattctctcttcctcttggctcgcaggagtttgaagtcaacggagtccgttgtttcaaatccaaacagatcggtgctcctgttgatcgtcagatgcccatgcagatcagcatgattgactttgaaaggtttgtctacccaatatcctttcggaattttactggaagctaagtttatatataggtccgattggcagcttgaagtgaaggctcttgaactctgccccgaaaaggagatatcccccgagctagacaaattcatgcgttctattgctttccaatggaacccgagtgcaaagagcattggatctgtcccccagcgcaaggcgaggttctcatatggtgcgccagtcaagcgtttcgtcgagaaggccacaatccaactccaagtcaaagactcgccgcatgtcttcgagctcgcccgcttcgacgagtacacgtacggggttggtcactggtcgatgacccccaaagtgtcctggggtgcatcgctgttcaatcctagttgggatgatatactaggtgagcaggctgatgtcaaggctctcgatatctccaaagaggggtgtctgtcggtgttctttcccccgccgggagatgagcaggaacagacagaaaagccgaaaacggacgatgagctccgcaaggaggccgagaaccgaaagatggatgaggagaagcagctgggctctttcatgagcactgtccagcaggttgcgcggatgctaggaaatcctggcgctgagatgccagacttccttgagaacgatcttggaagtctgttctagtcgatgtgtgcaaatcgtcccaaatttgtcgcatctcatgcgaccacaagggccaactcagaataataaaaaaaaaagaaagaaagaattaaaacgagacaaaagacaaaaacaacacccatatcataaccgtccggcttgctaatcaagccgagatcattaggtatgtagcaataacagtgccaattcagagttattcctgttcccaatatcggagaactcctttagccctagattcgtggtggattttctcgttcttataattcctctccagtttgcttgatccaaaatggtgagacagagacctgtatattatttggatttttctatggtaagccatgtttggcctgttcgtaccacacaggtcgaatttaaccctgaggagcaccctctgagagcaacttctgcctcaatgctgtaggaaagaggttagcaagcgaaaagaaatggtctcgcaaagcaatgcgaatcccggctcctattatccaggtaagggtcgactaactctcttccgtaatgcgcagttgcgagctcttggtctgtacaatcttctccagctcctgcaagtttgcctccagtcccttgaccttctcaccataaaatgcgaccgccttaggcgcagtctggaagaagaaatcatcagcccaatgaacccgatcaccgatatagccctgccgccacataccttctcaacataaaatccagttccgacatcaacaagcaccttctcgcgatccgtcaaccggcccttgacgtacagggagctggtgaggggcacgaggatctcatcacggccatcggttcccatcttctcattcccaatcacgccgtcgttgatcgtgcgcacacagtcgcggaacttggcctgggcggcgcgcagcttcgtgtgcgaggtggtcaggtgttccaattcggaggtgaggcgggtttggagtgcgcggagctgagggatggagagggtggcgaggttgactagtttctggtagttagcatgtatttatcgccatatgacacagatagccggaagcccgcgctgtgtcattctggtgatggggggaccggtgacgcactgccttggggagctccttctgatggggcgttttgtgacattttgggattcggaaagaagaatagggtatggtattaggggggatcgatttccgtgattgttgtgttattgtagatcagatcctcgcattgggaccgtataggtggtggggggagcttcaaaaaactcctgggtcttgttgcgtggtgatagtggggttaagtgttggcaggcggaatagtggacggttgtgtttatacccacgcacttgacatacagcaaagatttgcttattacctcatattgtatgagcgttacaatttgttaaaagaaagctgtcagtatattatccatatattaatatatattaatccattcattcatagctacaagtactctgtaggtaaaatgctatctgcggggaaaaaaagatcactccgaagttctccgctccgctccgtaatccttcttcaccacatatcaatggcgtcgagactggcagcatgtgaagcttgcagaaaggcgaaggtcgcctgtgatcataagcgaccagcatgtactcggtgtgcaagcaacgacagagccgggatctgcatttaccggacgaccccgttcaagagaagaagagcggagagctctacacctctgcagtctcctaggtaggtaatgcatattcatatttgctttactttcacatgcttatcaagtctgcagtcggctaccaccggcccaaccatccttcaccccaaggaataatccctatccaaacccgggctttctggggtcctctagccatgtcgctattttcaacgaaatttccccgcaagactatcatgcatctgatacctaccaagcctccgaggatctcacgatgctgatgcagttgcagtccactggcgagaatatcttgttaatccaaggcgcggatgtcctcagacagctgttcaacacatttccgctagccgccatgaaagattttgttactttttggctggcaacgggagcgaatctagctctggcagagccttttaccgagaagtgtactgaaaatatgacgcgcctgtttacgtccttctcacaggaagataactggcatttggcatatgcccagcgtctgacacaaaactcccgggaacctttgcagtttgacagcacatccgatatggaaagtttctccgcccagtttctcgaccagaaattccgatgggaaagtctaggcatcttcctctctgccgtgagccgagcagcaatcgctataccatttttcccgccattgttcaaaaccgaaaaggataatttcgtgcttcggaagctctctacaagacttagtgatcttgcgttagatattgttctctcgttggattgcttaaacgacctacaactggttctacagtatgagaactttattgtacacacccatgttgatggggatcaaagtaagaactcctcgttgattttgtctgtagaaacccgcagctcacagagaatccaggctatcactcttggagtagacttggaggtgttctgtcgtccatgtttgcccttggctaccatgagaatatcgaaaaaaccaagccaccaattccgacattcctttcggaattacgaaaagcagcttgggccaccacgtactcagccgacaagaatgtggctattttccttggtcggccacctcggatgagcaagcggttctgtcacttccaattgcctttggccccgacaagctcggatcaggttttcaatgcctcacccgttgaggacgaggtcgtcagatggaaaatagatacaccgatctgctacagggcaggtattcggtgggcgaccctttgctccggactgaaagaagatgtcctcgaattgcttcgattaaagcagcgcgagaatttcaatcggaaagctaggtaagttagcgccctccaatgtgggaaccactttctcatcctagtgtttgatatagcgtcattcggcaaaaggctgaaactcaatgggcaaatctaccttctcaattccgactttcgggccctttgaaagaatgttctggggatgcgttcgaacgtgaccttatagctagcatacgcctggaccagctacatgttctctttctacttcaattgtcgtgcctggataccctgactgagcccgatccgtgtatactcgacatctcggatcaaatactctctcttgtagtggacacaatccttctacgagatcaactggtcaactctggaattggactcatttggaaggtatgtctatctactatcaggacttgaaccgttacttactggactgaacacctattagatcgctcacttcggacttccagctacagggatcatcctcctgtcaatgctgaaagaacaccgtacattaacagaaggaagatcctcgtggtctaaaacaatactcaatctcggtatctttgttgcgcaggttcaggtagggagcatcgttcggcgtggagatccgaactacgctttgatatccaaagcgacacagacgattgagcggttccttgattctatacaacgtgaagggatacaatccccgacacagctgtcaccgcagccaggagagaatggtgattgggctgcgtttttcagtcaggatctgtgtgatttcgagactgacttttgggagaacctcgcgtatcatccttctttattgccttcagaccctattttgcctccaatataggattaatacagtaatataaatgcagaatacatggcgaaacctttcatcagttacttaggcatggagttgaaatcactaaaatctcatttaaagaacattatggattattttatcaagtaggataccaaagatatataacgataccaaactctgccattatctatacatcaaatcaccttcggtcctctactatgatttgtgtgctatatcgagacacgccggctgttgttgaatcgtcataagggagatcactcacctatctccaaaccatgctcctcatcttggtcatctggagtgggttcacgggccttaagaaggaaataatctcgcatcgaagaccacacgctactgtctggttcaacagacttattcttgatcttgtaaggcgtaaaactttcacccatccatgcatcaccatcggcgtccagaatttcttcgtcatttgaagacgaatcacttagagtagtgaaggtactccattcaactttctcctttggcaaccgcgaggccttcgatcttttcttttgtggcggagaagtttctccgtccttttcgtcatcgctagtccgcttgcgtttgccttgttcaatagtacttgtggaaataccgaattcagtgcggggcggagatggagcttctgtagtatcagcagtatagaagtcatctgggataggggaatgaatatcttccggtgcaacaaggagacgggagtctggaggagggtcaatgctaggttgaatgaaaggggcagtagggggataaggggaatgatacccaccggaagcccaaaatgtatccttcgtagcagccttgggaacaggactaacaggaaatactggggcagggacaggattcggagaagcaacaggaaatatagtacgattacgagtgcgaaccggggtaaaagtatgaccagaagtaggaacgggggcaagaacaggaacaggaacaggagcaggagaggggacaagagcacgtgcacgagcacgagcacgagtaagacgagcaggagtaggagcaggggcatgggcaggtgtaggggcagggagaagggaaaatccagggccagggcgaggggcaagaccacccgcaggagcagggagagagaaaacttcaaaaataggataattaggatcagtgactctccatgtgggatcagtgaagcggtaaaatcgaagcacatcgaatatacgctcggtaagctccgctgagtctgggacatgagcaagaactacagctggcaactcatgttgcctagcagtaatcctgcgtctgacctcaaatccacagtgacctctgaatgttccgttccaaggtcttccttgttgaagagcattgtacagaatgggattatagatctctttaatcaggtgttgggtggccagtcgatcttgagtattcgtagccatatcgatgccgagtgctgcccaaataggaccctcatggcttgggctcatatttattcttaactctgcggttactcgagccatactggaagatgctgatgagaagtgggtttaatcgaagtcagtattggactgttgggttggattgcaagactgttggcctgtagtggtttagaattcttggaaataatgagacttgagatggaatatatcaactattaagtaccaaaaagctcctttgtaggctattagattgttgtgaatatggtctatgtattttggaagacataaagagacatattcttctcaaagaacactcttttagaacaaagggatgtgtcaataaaataatcggcaattctaaacaaggcctttatgaggtagttaagaatacaagttattgtttctcttcctgtagaaacaaaggaagggaaaaggagaaagtgcccaagaataactacccctgttagaaacaaaaggaaacccacaaaggaaattaggaatgaagctcgaatctgtcttctaagatattgatctataaatggatctctatagaattaaagtaatggcttttgatgaaacggccacctgcgtggttgaaataactgtaggtgatgcttactgaatacctgagttcatcttgtgaagaagctccctaatcgccatcttgccgctacgctgggctatttcaatggccagctcccttttatagttcaacgtaagttataaactacagatcaacagagttaaaagatctcacggggtcgtcagcctctgcttcgagagttgagatctagaaagacatcagcttgacagagccaaacagtatcctctatggtgccgactgctgtgcaacatgtgtttccctggaaacagtctgtagcttcatcattagttcaggtttacgcggctgcagggggtgcctaggtagtgctcggagtgagtctgtgcttattcctcgcctacttaaggcaaacaatgccgctagaccgccacacttgtgttccaatgatgattatggactgaatatgcttttgtaggaacttattcagacaattcatccctaggcgccgattcaaaggatgagcagctatctctgtggtggcttgaaagcaccttttgtctaccttgggtgattcttcgtatctgaaatcagtttcaccggtagtttcgttgggagcgagttggacctttccgttgcctaatacttattctggtcaaggactgtactagtcctttagcatgttggcgcaaactgtatttttcaatctcactccggaacgaactcatgtgcatgaagcaagggatggctccactagactttctgacagggctcacaaaatatcgtaaaaaccaatgttgatataggagatattggtagggtaatgtaagaagacagcgccgaggatcttctaagcccgtcgtggggctgtgtagagggggtttatgcggaacgaagaaggcaaaggcggtcgaacttggtttcaagaaagggaatagacctctgctgtacacagacactttacccctcgttgactaatattcacccacgtgataatcacatggtccatgcggcagtgtcacgtggtaaaaatcaccaatctcggccatgagcttatgtttctaggctaaacgggaccccggacccataattctatattatgtaatattctgaggtacttccataaattctaattctaatatggcgtgtactccctggctctcaataatggcttccgcctaatgaggcatcctctctccgagacattccggatgtctcgtctcttaccgtggttctactattactgattttacagcgcgtctcaagacggtgagcagggcaactgaccccgagggcacgtacccggcggactccaccttggtgtcaaacttctgttagtacggggtacgtgggattcgccagcctccacctatgttgtatattttttagctcataatttaaggtagtattcaattcggtattttacagagtcaaaataatttaatgtttaaatactaccactctaactctcaattttttttttacctaactaacgagggctcccgagcatgacgaacggcctagaatctggctggcatactgtacctaacatgagaaatccagggttatacaatagaggagaggagttagagaaactcaaagcaatacaaaatacacgttcaatactacggactaagattgattagggatatattaggccgatctttgcgccactgaaccctactagggtacgccctgttagggtacgtccattgttgtatacataactacatgtacatatgtaggtgcccacctagttagacgggatacttttcttgataagatatttgtaatagtctggacacggagtagtccgatacatgcagtaaatgtcataagttacaactcgatatctcaacaatggcggtctatatgaacgattcctattagtatcaaatgagtgccacggtccgagaactccgatgacctgcatcctgaatcctgaatcctgaatcctgatgtgaccctgcgcgctatgcccatttatagcttggccgaaatcaccaaccttctttccccgcatagaacttcgacgtggtcgattgaacgacgatggatgattattgccagacttgggctggtttgaaattcggacaactgttttgtactctttacagcctcaatttacggtcttttgctcgatgtcagtggcgccaaaatttaacatcatggcgtcctgtccgtgacttgggcccgggtgctatgatcccgtttgcgtcttagtgctgacgggtggtccaatgtggctattcctcaaacaaagaacaaagccacatgtttcatttgggggctgatctgcagtttcgctcaccccacggggaaaagtttgatctcttttatattctgtggggtagccgaccttccctctacacttttcaaaatccaagatcttctgaatctgaaagctaccaaaaagctccccatcatggatgaaaagtcgtctaagagcgatttccctcactttgagcatgtgctcccagctaagacagagctggatgaggctatcaaccctgatgcacctccgaggcgccaggcgatcggtatcaacatcgttgagaatccgttgacggtaagtcacaactgagagcctctttcatgttcgtgtcggacatgaacactgatcatctttgggtatacagcgcgtctctaaggagcaggctattatcgatgcccggaattatgccgagtcgcataatatgagcgaatatgccgatctgtttgggcgggctgctgtggttgcgcggagccccaaagagttcccatcggctactgagatcgatgaagaggagcgcactgctcttgcatacgagagggaccataaatggcacggctcattcatgctctggtactcaattagtctatgtgctatcggtgctgccacacaaggatgggatcagactggatccaacggagccaacttgtccttccctgaggaattcggaattgccggtaaaggaaaagatgaatggatcgtgggaattgtcaactccatcatcttcttgaccgcaggccttatgtaagttaaagccctgtgatgatcatttttcttctatcttttgcgactgaccttgtacatagtggtgcttggattgttgatccacttaaccactatttgggccggagaggtgagatttttgtcactgctctctgtctcactgccacgcccattggttctggcttcgcaaagtcatggcaaggactcttcgctgcgcgatttgtgatgggaatcggaattggcgcaaagaacgctacagtgcccatttattcagctgagatggctccagccagaattcgaggtgctcttgtcatgttctggcaactttgggtcgtagccggtgagtatctctaatccctcgtcaaggaacatggctaatccctaatgcaggtattttcttgggcttcgctgccaacgttattgtcaaggatgtgaaagatatcgcctggcgtcttcagctcggctccgcattcattccatccttcatccttgccattggcatcttcttctgtcccgagtctcctcgctggcttatgaagcataacaggcacgctgaagcattccagtccatgaagcgcttgcgagctcatccaattattgctgctcgagacttctattattcatacgtgatctacgaggaggaactcaaggagactcggggcgcaggctatttctcacgtctgtgggactgtttcgccgtcccgaggatcagacgggctaactacggtgcctcgactgttatgattgcgcagcaaatgtgcggtatcaatagtaagttgtatctcgtcgcgtgagatggcctagtggtaacacgttttagtcatttctttctacagctcgaccatcttccgggatgtcggttacacagaagaccaggccttgtatgcgtctcttggctacggtgctatccaagttgtggcaactattccaactttgttcctgatcgacaccaaaggccgaagaaccttgactttgatcgtaagccgttccgagatctcttgcggaatatcactaactattgttcttacgaagacattccccctgatgtgcatcttccttttagctggtggtctctctcttttgaacaagacggataatcatggggctatgattgcaccagttgccttgtaagtttggtaattgttttatctgagtacaggctctgattcatatctccgactaggtttgtgtatttgtttactattgcctattccttgggcgaagggccagtcgctttccaatattcagctgaggtattcccgaccattcagcgagaacaaggaatggcgtgggctgtttgtatcaacaacacttttggtaagtatccctacatcaaacctatcgaacattccattgacaaactattctatagctggcatccttagtctaacattccctcggatgatgactgtgatgactcaaactggcgcttgtaagttaatagtcctagaccatgctgttcaaataactgacccttgctctagtcggcttctatgctggtcttaacctcctagcttggtttatgattttctgctttgtcagggagaccaagcagctgactctagaagaattggatcgtacgttaactacggaatctacatgaccatgtactgacatatatcgcagaggtattctcggtgccaaccaagaagtttatccactatgaacttactgtgtggcttccttggtggatcaagcgatacatcttcagacagaatattgaacgaccgccaccaatcattgcactgggcgacggtgtcaggtaaaagctcatacagctctacatactgaagatcttcagactgtgaattttgggttggcaggtctttttttttatcactggtaacttggtctttcattatcctatctctatgaggtagaggagagtgatctacattttaactgaatagttcggtcgttacatacgcaaaatacatttctagtactatgcactgaagcagtgatatcatatacaaataaggaaccaaacttcgcgtgccttcctctcttgcgaaagcactggtatatcaggtcggtgtaggtaaacaaagtcttttggtaggaacgaatcagcccaacttcaaatttgtaaactccgaggtcaagtacaactcatctcaatgcatattcttcgactcgtatttcaatatcccttcattactatcatcatggaccaaacatctgcagaacgtcaaactttcatcgaagccccggatcaagacacagtgaacccagaagcctcaaccgcgaacatacagtctacactggcagatgatcgatttcagtcaacatccaacacctcactaatcccacatcttgaggatgtccatcataacgtctcaaaatcactaagggtcaatgaagatttgatgagttggtcagatgcctggttcccaggggacgagcgactgtgccccttgtggatggggccttggattgaatttcctcaacttcaagaagagatgtggaacgaaattttcaacacgcccgaacttgtcgatgcccgtattttccctccgcaagtcgccgtccgccacgctgctcacatcctagaatggtacatagtgtattcagaggagaccttgaagatatttgcaaacaggtcagtggacgatttcctcgccacgacttttaattttatggaacaagaggacacattgcgatacaggttcagtgtccggggacaattgcgcttcgaccgcccgcgtcattgctgcacctctgttgcgaatttcggattcgaagagccagcatatgcagtcctgtatattccttcatattgtctgactttgcccgaactggttgcagggttgcacgggacatcaccgatggagaccttcgagaagaaaccaactacattcgaggaacatgccacttacgtagtgtctcgtgcgatcgttcggatctattcacggatgatctgctctggacgccggtatgggtatatctacacaggagaggccttggtattccttcaaattcccccggacgacagtagcaatatcaaatactatctatgtgttcccagtcgagacgtcgtttatcatggttatgattcccagtcagaatgggttcgccgtactactttgggccaaatcttcgctttcgcacttcagtctttggctgccagcccaccaacgcaggaatggcaagacgcagtttaccaaacctatcgtgcgcttgataaagatgactcaattctcctgcctcaaaccccggatgccattcgatttagcccgccagcagagtttctatatgagacctcgttctgggttaaattctgggggaatcttctgcttgcagacatacaaataggcgaatatgaaacctctcgttcacagagttctgagttatcagacgtttgcaagccttattgtacccaggcatgcctccttggtacctttcaaaaggatgttctggatcagaactgtccgaatgctgctgcccatggcacagaaagacatcagattacctcacaggagatatgcgacatgatgaatgaacaactccgcgcgaatcggtatagaggattccaacagctgcacatcgttggtcgaacctgttatctgttaaaagcaacgttgctgtctcatggatacacgatgttgatcaaggccaccagctccaagcggtcacacaggatcaatactgagttgaaaaactatcagaatttgcttccattgcagggaagtaagattcctgtatgtcttgggatgttttcgccgaagatcccatattggtatcatggtactaaaatgacctccatgctgctcatcagttggtctggaattcgagcggaccaacataccactcttgaaacgtgtgagtaccttgaacaggagatgcaaaagcttgaagacaaacttaaggaacatggagttgttcagaaagatgcagcttttcgcaatgttttgtggaatcccacatcacaatcttttgtgatggttgacttggaagatttgaagtggctggggagcgagggaagcgaatccaacggaggctcaattcagtccagtgactaccttggagatgtcggcaagtaacctttgattttggcgctcacaaagatattgtgagtaacagttggttgagttggaagaaaaggcaccgcaaaaattctatatttattcccaacgctatctttatgatgcatgccgtcttccttactgtttgtaaagtcccttggacctgtataatatggttgcaataaacccaaaacaaattgatcactccagatcaaaagtctagtcgacatatattagcattggatgataatgagcccacaccacgaataaacataccatatcaaaccaaacaccacctgcaaagttagactgacttttcccctggttcttaaacccaacactctcatagaaattcaccaaatagtcatgcgcaataaggacaaccttgttcgccccgaaagatcctctcccaagatgctcaaggtatgcccggacgagagctcttccaaccctcttgccttgatactccggcgaaatagccacagagtgaattgcaatgttgtcaccatacttgtgattcccaattagttcatcattgacaaagaccggttcaccatccagtgatcgccaattctccggcattgacatcgatccgtcggtgatacgtgaataaggagatcgcactgcaatgacatgtccaatgagtgtaggtgaagctgggtcttgctcattctcaacaaagagtcccaggcatagctccgggcatgctcccaagcgatagcagaacttgtttcgtgttagaggaagcaatcttcggaattgcttatttgcctcagatctggctctggcttaccttttcctcggagcatcgctccggctctataaaggctttctcgacggctacgcagatcttcacgtcttccttgttcagagtccgggtgaaagcattggctcctccgaggctcgggatgtgaatgttggtttggttcatgttgggaggcttggattgactgatgagaacatgcgaacaggttataaattcgaattgaaaacaacaaagatagaaacaattgtttaatgagtcaagggtatttctatatcggtgggtggagtaaaccggagtattcgggccggagtgttcggcgtggatcacctagtggaggacctcaaatgtgaaatccggagaaaaagtggacattggatcttattgatgcattgattagagatgatctgacgctctattagctacaccgctactgtatatcgtggccaatagcaatcattccaggaatcatgttatcggctgtatatctaagctaaatctggggaagaaaaatgctgtcattttttagttgttgtttggcaaaagcctagtcttacatttataggataggagatgagataatgtacagattcacttgctaatattacatactggcgctttcagccattcacagtttggccaacaaggactgaacaaacgtgtggagtccatccaacggcacatcctccttcacgtcgagccgacggcactgcacctccaaagtctgtttcttcttccacccattgccaacaacaataataatagggtacccaatcaagtccgcatctccaagtttccagcccatgcccttgtcccggtcatcaaggatagcatccacaggcgctgcagtgttgccggtaagactatcatacacctgatcggcaacagtctccagtcccttccccgagactaccacaacctcgtagggcgcaataacacgcggccaattgagtcccttagaatcggcaagtcggttcgccactgcggagatcatacgcgaaacaccgataccgtgacatcccatctgcataggtacgatctgttccttggcagaagccttcgcacctagatccatatccgaagattcctcgagaagagcggagttgacagacacagacgcgtttagtactttgctgtaccgcgttcccaagtggaatgtgtgtcctagttcaacggcagagtggctagtcagcgatccatccacgcactgcgagcaatggtctccgtcatgaacgcggacaaggctgagtttgtttgaagtctcggggaatcggtccagcttggagtaatctatgtccgaggctgtgcagccaacttcctggagcagatcactgagcggcgggcgctggtatacccgaacctgtgagtcataaagatccaacacacgcggcttatgcgtggaggacttgtttgcctttacgtgggcggtccatcgctctaatgggttctccacgctcaggtcgaggtcaataccagcggcggtcgctactgccttgacggcgtgtgagttgacatgccgctcgacgggctccgtcgcgccattttgcatcgagaatttggggtaccagctccgcacgagggtattgctatcgtgagagatagccatccacatgccagttgagattgttggtccaccttcgacaactgcatcatcggtctggaaaccaggtgtcatggtctcttcggactcctcagcgatgtgcgccttgccgtctgcgagttcttcgttgtaaacatggtcacagtgcgagcagctgaccacctcgtcctcgcccttcggactgatgaagtggtactcatggctcaatgagccgcccatatttcccgagtctgctgccgcgacgaggtaggggatcttgagttcgttaaataattctgtgtaggcatttttgactgcatcatatgttttcattgcttcggtcagactgtagtcgaatgtatagaggtctttcatgacgaactctcgcccacgaagcaggccctgtctgggccgggcctcatctctgtacttccgcgctttacgattctgtcagtgagcttcataaaaatggacaaaaaaagagtctcactgatttgatatacccgcagaggcaggctcttgtatgatgttgtcagattccccacaagtgtagtgatctcctcctcgtgtgttggggccaggagaaaaggagtgtctttccgatcattgaatcggaacagctatgatccatgttagtgacattatgcaatacagtgggtatgatcaacttacttctgagccatcggtcagtctgccagactgtgcccagagctcttgtgaggatattgaggacaatgagaccttggatgcgcctagttttgatttagttgccatcccatgatatagacagggtatattacataccgagagagcgcatatgcttgtcaatcagacgctctagtttatcttgaacacgtagaccaagtgggagcatatgaaacaccccagagtatgcctggagaccgtcagtgatatttacttgtacataaagatgtgacttctcacctgtcgaaggaatccacctcggactagcaggtcattggcatcctctagatctctgttaacatctggtgatagtcaatccctatcgagtttccgaatggcgtaccattttcaccatcaacgggcttcttggaaattccaccagtaggaatccatatgtttgaaacgcggcttctaccgtcaacctacactgagtcagtactcactgtcaagcacattcaatcaatcttttggaaggacgtacgtgaagattgcattgctgaatgcgcaggctcaaggctagccgccgcccggctatgcgcccggatagaggtcgtagcccagaaatcatcgatcaaggcagcttaaggcgtcgaaattaattattttcgcaattgaaacgctggctgaacacaaaataaattgtagagcaagccgagtctcccttctccgatgtttcttatcgggttggtccgagcgccccgataacgccgcaaaagatttctccgtttaattttctttcctccatcagtcaaccctaaacacaatacaccatggctacagggaaaggaaagcgctcttcgagcgcaaatgagagtgctcccgcgacgagcatctcggctcccgctgccgaacctctgccattcatgccggacgagagtgccttcgcaggtctacgacagaaaatcgaacagcgtttgaagaatcagagtcagaccaccgggaaagggaagaaggacaataacaagccatcggcctcggccaccaatgctttcgcaaataaaggaaagcaatttcccgccaagcccggccgccctcaggattctgcgcaaggcaagaagcgagatcgcaacggcgaggtaattgctcgcgagcagaacaaggatggaatgaaaaagcaggaaaagcccaaagctggcaagaagagcaacgatgacgagacattgcgccaagaaattctagctatgggtggtaccgaggaggatcttgatcttcttgccggtgttgagtccgagtctgaggttgagggcgagtctggcaaggttgacgacgatcttcggaaacagctctctagtatgttggaagcttcagggcacgtcgtgcctgaggatctagcggatgacgaagtcgaagaggagatagagagtgaggaggatatcgaggacagcgaagacaatgcagagagcagcgggccagaatctgatattgaggaagcccccgcctcgaagacaaaagagtctgaatctgtggtgccgaaggagtacctgaagctggtaagactgaaccggcctagcaccacaacccttttgctaacatgatcattatagaacgttcttcctcggtccgactggtacaatatccctatgccctcctccgccggcgacacgaaacatatgaacgccttgccccgccacctgatggagcgcgttcacgagctggccaacaaattgctgcaggaagaaaatgaggagtatgcggcggcccagagggcatctgcttcttcttcccacaagttctactcgaccattatgacgtctggtaccctgagtgataaaatttccgccttgactcttaacgttcaagagtcgcccctgcacaacaccaaggcactggagactttgattagtctcggaaagaagcgcagccgtgcgcaggcagttgaagttttgcggtcattaaaggatatgttcgcccagggtaccttgctgcccagcgaccgacgattgaagtctttcactaatcaacctgggctcgtcgccgcattccaaggtgccggtgggcggtggaacgagaaagaccctcttccgggtggtttgaaaaagagcgacctgattgtgtgggcttttgaaaacatcgtaaaagatcaattcttcgaagttattaagattctcgaaatttggtgcaatgacgagatcgaattctcacggacccgggccgtcagttatgtctacgaacttctcaaggagaagcccgagcaggagaccaatcttctgcgacttttggtcaataagcttggtgacccgggcaagaaaattgcgtctcgggcatcatacctgttactacaactgatgcagtcgcatcctatgatgaagccaatcatcatcaagtcagtggaagaagtgctattccggcctggtcagagctcccacgccaagtactatgctgttattactcttaaccagactattttgagactgaaggaagagaaagtggctgctcagctgctggacatttactttggactgttccttgtgcttttgaagccctcccaccagcctaccgatggaaaacctgcccacaagggtaagactgcccccaagggcaaatacaacaagcatggaaagggatcgaagggcaaaggcgacgacgatgctgccaaaggacaggcccaggacgacgaaatgcgggagaagctaatctccggtgtcttgaccggtgtcaaccgtgcttatcctttcactgactctgattccgaacggtatgttttctttacactctactcccctatgcaaggtactaacttctactagcatgtcgaagcacctcgacaccctgttccgtatcacacactcctcgaacttcaacaccagtatccaagctctcatgctgattcaacagctcacggtgtctaaccaagtctccggcgatcgcttctaccgcactctgtacgagtccttgctcgacccccgcgtttccacctcatcaaagcaatctctctacctcaacctcctatacaagtctctcaagaatgatttgaacgtccgccgagtcaaggcatttgtgaagcgtcttgtccaggttcttggcatgcaccaaccttctttcatctgcggtgtcttcttcatgatccgtgagctcgagaagaccttcaccggcctttcatccttggtcgatcagccggaggagaacgacgatgatgatgaagaggtcttccgtgacgtcctcgatgaggacgacgaacagccggaagccgctcctgttgttgaagccaagaagcagaacaacgtgtacgacccccgcaagcgagatcccgagcacagcaatgccgaccggagctgcctttgggaattgctgccttttacttcccacttccatccttccgtgtctcttaacgccacaaatctgcttgagcacaaccccatgagtggcaagccagatctgactctgcacactctcactcacttcctcgaccgcttcgtgtaccgcacgcccaaggccaacgccagctcccgcggtgcttctatcatgcagcccctgggtggtggtgaagccgccgaccggttggtggaggcgggcaagaagacacagaaccaagtgcctctcaacaccgaagccttctggaagaagaaggccaacgatgttgccgcggaggatgtcttcttccacgaatacttcacccgtgtcaataaggacaaggagaaggtgcgttccaagaagagcaaggacgttgatgacgaagacaactccgacgcaggccttagcggagacgaggacgagatctggaaagcgctcgtcgactcccgccccgagctggaagccgacgaggacagcgacgacgacctggacatgtccgatttggaatccgcgttggactccgaagaagatggcgaaggcgcagacgaggacgagtccgacggtggggttatcttcaacgacgagtccgatgttccctccgacgaggaaatggccgagttcagcgaacccgaggaagccgcgccggccgtcaagaccaagaaggccgccaaaaagccctccaaggaggtcgaggaggactctgacgacttcgatatggacgtatcagacgacgatgcctttatcgacagcgacgaagatctgccctcggatatggaattgggtggagtcggtctggaagagcccgaaaagcccgatgccgcgcccgagtcgaaccgcagcaagcgccgcaagctcaagcagcttcctactttcgcctccgcggacgactacgctgcgctgttggaggacgaggacgacggaatgtaatctgtttcactttgtacaaagagttcgattattccttaccccccgtggggccaaaattcttttttttgcatctggagttgttacaggttgcacacattctgccttactatccctttcattgttatctatatctattctatctactatctattccgcctcgggaccctgcagccaataccagctctttggataatgcctaggaccacccctttctaggcaaaattaggcaaaaataggcaaaaataggcaatgcgatacggcagctgtagcagtccaatcacagcttatggatttgggttcaacaagatcgcaagggatacggagtacgccgtgaccattgaaataaaaatatctcaacgtgtatactaaatatcgcgcatatgtcataacgtaggcaacctttggattgaacacagcgggcatccaaataagctcagatgttttgtgcttataagcgcccgaaaatcactcgacaccatacggagcatatggagtgcgtagtgtggaccttgatgccatcgctgtgggttcgcacgcaagatcggctgctggggccgaaggccagaacgttggatatttaatgcttttttactattttaatgtctcagtattcaacgctttctttgggatgtctgtcagataataatatatatcatatgccacggcattggggctgcatgctccaggcaagggtccctggctagaccatgagtcagcggcacgtggtacgggcgtgtagaaagtgccgatccttccatttgtactccggaggcaaagcgaaatcttcgaaaatgaactccccgagagagatggaccatgtttccactattccatgctgaatcaatgttcgcgagccatatgcgtggattccacttcccgatctggatgaattcattcgaccaagccatccgcatgcggggccagtccaccggacgcatagaataatggacgatatgatatgcgggcgcaaccgactctgcatgagggaagaaagcggattcgggatgcccgtggagcttgggggctcagtaccatggactatgggattcatccagtccagtagtcaggatacatgtagtactttgacttcaggtccagaactgttccttggcacaacccaccgtaagccacggctgatgcttcaactacagaggctgatcttggctctggcaacgtcatatctctacatttcgcctagtagctgaattttgattttgaatttcttttttactttccggatgttaaaggctgtggagtcggaaatgacggtgttctccagataaccatagaagtaccatgcgctgggatcgcaatacccgatatgctgctatactaacgtcaaggttctttttttttcttttttatttctctttccccctttccctctcttccctccattcatatttccactcttcgtttcagttgagaattgcatgcagctcagcgaataccacctcaggtacccgcatttgccctaatccgtccagcacggatcgcttcttccaactggccgatcacccaggacttgttcatttcatttgagtgtaagtgtctgattcatctgttcaaatagaagaaacgataaacacaaaagaacaaaattcgctcacacgcgaccagtatcctatttatcatcttctcgagcattgcatgcatctgcgcatactcaactctcttgactccaccgagttccgacaaagtcgcggttcgtccgctctcttaaataaaaatgactggtccgaaagaatcgccaaatcttgctcctgtgggctgggactatgaccggaaccacaatggcaccgagttgtctgatatgtccgagcaagagcccaagctgaaggacttcgacatcgagagccagccccgccgcggctcgcagcataatgtcactgccatcgactcattgtcgatgaaggaaagtatcggtcgtcagattgacatcgagtcggagaacacaattaaataccggacgtgcagttggcaaaaggtgcgcttcggaccgatacggatattagaggcttgactaataaatttttacagaccgctgcattgctcttctcggagtatatctgtctggctattatgtcctttccctggtcatactcaattctgggtctggttcccggtttgatcctgaccgtggttattgccgccattgtcctgtacacttcattgattacctggtatgatatccctaacagccgcgaccacatgataagcctcggtgttaatatttgtataggagattctgtctgcgacacccggaagtccgcgatgtttgcgacatcggtcagtatctgttctgggactccaagattgcgtggtgggccacagcattcatgttcctcctgaacaacactttcattcagggcctgcactgtgtggtgggtgccgagtacttgaacacgatgtcaaacggtgcagtatgcacaattgtcttctcaataatcgtcgccatcatttcctggtgtttctcgctgccccgcacattcgacacgttatccaaagtcgcaaccctctcagcattttttaccttcgtctccgtcgtcctggctgccgtatttgctggtgtcgaagaccatccggcaggatacacgcccgcactgggagaccccaccgtgcttgccgtcccgctcaagggcacaacatttatccaaggcatgaatgcctttttgaacattagctacaccttcatcggccaaatcaccctccccagtttcattgccgagatgaaagagccccgcgacttctggaagtcagtaacagccgtgacaatcgcggagatcatcgtcttcagcgtcatcggtgcagtcacatacgtctacgtcggcaaccaatacatggttgcgccggccttcggttccctcggcgacgacgtttacaagaaggtctccttctctttcatgataccgaccatcattttcctgggcgtgctgtacgcctccgtctcggcccgtttcatcttcttccgcctattcgagggcacccggcacaagggcaacaacaccgtcattggctgggctgcttggggtggaatccttgctgcgctttgggtcgcagcctttatcattgccgaagtcattcccttcttctccgacttgttgtccattatgagcgccctctttgactctttcttcggcttcattttttggggtaccgcttatatccgcatgcgctcggaggattacggaccccgtttctttatggttcgtggaattcgaggctggctcggattcatttttaacgtctttttgattgttgttggtttcttcttcttgggacctgggacatacgtaagtgatgagtccttgtttggcttggcttgttggtatttcttatgctcctgctaacacatattccttctaggctgctgttatgtccgtcgtcaccagctacgatgagggcactgttcgcggcgttttcacgtgtgccagcaatggactataaaccccctgcagggcggggggtttgtaaaaagttttgtcttcatcttggcattgaatctgttgtgtacgttgtttccaatacaccgggtcattgactccggtgatttcatgactgatgaccgagaagggaagtggtcgatatacacatacgacttgaccacgtttggggtatagaactgtttttcggatggacgcggatggatttcaatgctgtgtatagcttcatggaaagggacgggttttgggatatgctccccttatgtgtatattttatccctgcattctttacagcagttgcacctttcaattcaatgcagatggtcggcctagaggttgcaatttcgctctccgggtttgatttgacatcgccgcggcaatactccgatggccttttggtctaccaatcaatgtagccatgaacctcaattgccttcggcgcaaggtgtggacgataattcgccgataatacttcaatggctagcctcttatatgttgaaacagaccagcgatataacctacagtctgcaagaagtgtacgtccaaattgggcaatcagctaatccccgatcgcctatcaacacgtgactttcccgctcggcttccccgacggcgaattggtgacttctagcagctcatttctttctcttcttctcttttcttttgtcaattcaattcttcagcattgattcaccatgtcaagcgtccgtattctcacacgaggtgttgacctcgccgccgcgagggccgctacccttaaccttccccgcgcctctatcggctccaccgtacttcggcgagagctctcctccgcggctatcgtacgaccaacagtccgtcgatcattgaaagccaatgcactagtcacagacgtagcttcacgtgctgcgaaccaggccgtgcggtatgcctctagctccagcgagcccctcagcaagacacagctctatgacttgcacctggagcacggtgctaagatggtgccctttgccgggttcgacatgcctttgcagtacgcggacctgagccatgtggaaagccacatgtggactcgcgagaaggccagtcttttcgatgttagccacatgtaagtgaatcatctccgagccaaaacaaaccgcaatggctaaccaagttcctcacctagggttcagcatcaactcagcggccccggagccattgatctcctgaagaaggtgactccttcgtcagtagacaagttagctccgaacagctctaccctctcctgcctccttgaagaaggcaccggtggtattgtcgacgactgcgttatcacccgccgcggcgaagacagcttctacttcgttacgaacgccggccgccgcgcagaggatttggcctttctgagcgccgagatcgacgcctaccgctccaagcacggagccgacagcatcaagtgggagatcctcgctgaccgcgcgctggtcgcgctgcaaggacccctcgccgcctctgtccttcaacccctcatcaacaccgcaaacactccctcctccgaaaccgacctgagcaccctctacttcggcaattgccgcgagctgtacctcaccctcccagacggcagcgcaactgcacacccactcctcatctcccgcaccggctacaccggcgaagacggcttcgagatctccatcccgacctccggcgccccatccctaccccgacaagtcaccgagctccttctcaccgacagcagcaaatctcgtctcgccggtctggcagcccgtgactccctccgtctcgaggcaggcatgtgtctctacggacacgacatcaccactgcgcaaaccccgcccgccgcagcccttggctggatcgtcggccgtgatcgtcgcgatcctgtatctgctaccttcaacggcgcttccgttatcctctcccaactcgccagcccgaagactatcccccagcgccgcgtcggattaactgttgagaaggggcccccagctcgcgagggcgctctcgtccttgatatctctgacccggcgaatcctgtcgaagtcggcgttatcacttccggcctgcccagtccgtcgcttggcggtgccaatattgctatggggtatgtcaaccaagggcttcacaaaaagggtaccgagctggctgttaaggtccgcaataaggtccgcaaggctactgtcgtcggtatgccttggattaccagcaagttccaccgtcctcctcagtagagggtagaaggtgtcgacaactcctctaattttatattggttttgttcctttcttaaatgcagggactcatgcgaaatactagcgttttgatttattatttggcctttgtatatatgtttccgatcttatgactgatattcatcacatcaaaatattcttttctttcttgtcatagttcacacaaatttgtatcatgactatcatttttcaatgcctacagagtcacaatcaacctaccaagtcaacatgattatcaagatgcaaagcaccaagctgcccactttcaacaacactctcccacctacgataattcacatcctcatccccaccaccactcccagcctccggcgccaaagaaggcggtaaatcctccagtccagtcccccaagcactctcctccttcccaagaacaagaaccaactccctcccctcagcgaagaaatcatgcccaatccaattccgcgtataaggcacgccatccagggtcgcagactgaataaagccattcccacccgcggcagcgccagtagcattagccgtgttatactccgcccaattcaccgtgcgcagcgttgccgttttccccgtcagcggggagacaatactgacagactcgaagaacggcactgtgaggaggtacacgctctgtcctgggttcgggaatagtcccatcatcgccatggcgacgaacgagcccatggcgcctgagtcgtcgttgcctgggagtccggctggcgttggcgagaagtagtctgggatgtaggcgcgcacgcgggaggtggattttgctggacggccggcgtagtggtattggaagacggttaggaaggcgggctcgttgccgatgtaggttatgtttcggtcgtggaggtagtcgaggcgggtgacgaagtttgtggggccgccgagaagggttattagggtttgcatgtcgtgggggacgaagctgggatagttagaaggggtgggaataaaggtcttcatttgttgggggaagcgggcttacaattgatactcccagatgctggattcgaaggtttcgcccgcggtgttttgcagtgagcaggcgtgtccgctctcgtcgatgttcgagcacgcgaggggatcttggacgccccatgttccattaatatgctttggctggaagaaaccagtgaagccagtgtcccttcctctccagaaagaggcctggtttggtttgaataagttttgccagtatcgtgatcttttctcgtaccgctctgcatcggccgtcttgttcatgcctcgagccatttgcgcgatggcgaagtcgttgtaggaatactcgagtgtgcgtgagacgctgcgcgtcattgtgccgaacccttcgtagtcgaagtcttccacagggatataatgtaactctttccagctgcgtagaccgccacggccttcgctggaccagtcgtacggttcctcctcagcgtccttttgcacagctgcatacccggcatcccaatcaatgccatctctgagacctttcaggtagacatctgccaggacattgtcggcattagaaccgccttgtgtatatcctttgcatagtgacatgcggcagtccggcagccagcctaggtggcgctgggtatcgatgagtgatcgcaccatttgcattaccgaggaaggatcgaagatagtgaggaatgggatctgggaacggaaagaatcccaaagacaatagaacgaatcaaagtaaggctcactgctctgccagagcgggttctcgcctgtgtagttctgggggttgatcatagtccgatagattccactgtagaaattggacagaacggatgaatcgatgtttgttcgtgagacacggatcgggcgcatcttctcggtccatttttcgactgctatctggtgggttgcgttgaagtcaaagtttggaatctcagactctgcatgagcgcacgcttgctctgtgctcatgaagctgacgccaactcgagcgaggaccgtgttgtctgcggcggactcaaagcggacaaatccaccaccctacggaatgtcaatccttgtctctatataaaagaaagggtttcgactcactggaagcgggtacccattgatactgcgggagattttcaaatcatgaacatcagcactggcacgagaattgacaaagatgccactatctcgctgggctgcagggcttttgaagtccgcacagaaatgtaacatgtacgatcccgatccaaagctaggagcgaacctcgcatcaccggtcattcgatttgttgtgttatccaccgagatagtcgcattgtcctggcgggagttcgacagatcggtaaggtccagcaaaatcaatggactggtggtgttatcacttgggaactggaagcgaaacagagacgtatggtgcgcagttgtcatatcaactcggacccctgatgccagctctatagcaaagtatcccggacgcgcctgcacggagtcgggcttatacttcgttttccgttggttcttcggatagacacagccattgacatcatcgccggcgcattttgcatagggaaagagagggaaattccctaacgaaggactgccgccagtgccggagtcgtgcatgctggagaatccggtgacgctgccgccctcgtgggcgaaacctccttggttgctttctgagtctgtatcggcgacggctttcgccatgccgtatggaagcgaggctcctggaaacacatttcctgtggagaattggtcagtagcatgaatttgactgatttagctgttgaacttacctccgttggcactaccaatcaagggattgatgtattgtagaacatcataatcttccaatagaggggtgtctgcggcattaactaggatgcgactggttgaaaataacgacagtaacaaatatggtagcatgatctaggttgaataaagatgatcgacgcgtcggaaaggctagtatttaggtaacccttcatccgcaactgcctggaatgcgtgcccctggcgatccctgtctgttacattacattctgcatattcccgtatgtggatccggggataggctctcatgttttcgagagtatgtagtgcaaggatgtactggaggttgattggtgagactcgtgtgtccggaacgttaggattgagaaacagtccaagacaagcgagattaatctagtaagactttgccgcaataggcttcatgagtattcatcaaaagcctaatttcttgcaagcatactcaaaggaagaaagatagcatatttcgccaaaggtaggtctcattctggcaaaagaataagacagaaagcatcgtgtcttcacctggctatgccgatttatcaagtaaagagagctgtatatatatattggccgcatccaccatcgtgtttcgccatattcttcttttgtatccccggataccggcttccacgacaacatttatagcaatttgtccgaccttgccataccaaacagcgtaactcggactcccggttagcatctgttctctttaagctttctcggggtatgatcatagcttagtgctttcctccttcgtcaactgcattggcgggacaccggtatcgtgttcccaaaccaacttgtcaatgcgcccattgtcgttgcattcaaacacggctttccagaaaggtgccgcttggtcccagcccacccagcggccacgtctagataactcattccgtggaagtaaccaagtgaaggtgtcatcttcatagtgttcaagttggaacttttctgactccagcccttgcagcctccagtaaagcttgttgtccaccaaattcacaacaatcttgaacacattgatattatcccagtaagtaccgacatactcctctagtgctctaggtgatgttccgttctttcgagccgagcctagctctcccaccagtgctggataccacttcaagctctcagcgaccgagatgtgggctgcttcgatgtaatcatttctctctgattctggaacctcgagcagctcttcaaggatgagttggccaacccagtcaggaacatcatttagggccaaagagttagacagtacaacaataacactgtcagtgtctggaagtagaatcacaattgcgagggcgccaggtaggctgccctggtggaagagaatgagctgtgagggaacgcctttcccaacggtaggcatgccattggacatcagaccaggattgattccgatatgacctagccgattgggaagctgggctctgacccatccgagtgcgtatgatagctcgttcctcgagggtggatccataggaattttggcggaagtgagatgagaaacttgtttgaagggagagtctttggtcgctcccttcccggtgatgaattgatcttcaaagctagcggtgaacgttttgtataactccaaaagatcacggatacaggaccacgcgccaccacttggtccaccaaaccaatcttggcctcccttagggcaaggaataggagtagtggatccatcatcaagtgcgttgtagcactgagtgacattttgggtgcccggaggtggagatttaaggtaggttcgatccaagccgagaggatcgagaatacggctctgtacaaactcaaaccacgaaatgccactgacttcctcgatgacataacctgcaaggttatattgaagattgttataggacattcctgtccggaacggaagaacccgcggctgtgaattgatgtatttcagtccatcctttcctggaatgagaacgttgttctcggtaccgaggaccacattaccagcccaagccatgcctgatcgatgagataggatgtccgtgatagtcaagtgattctgcagcgtctcgtcgcttgaatcaaaggatggaagaacgtccttcactagtgtatcccaggtgagtttaccctcgtcgacaagaatcgccatcgcagaggcagtcaaagcctttgtcaacgaacatatgggaaatattgtttcctcagtgacgggtagaccagctgctgtgtctcggacgccaaaacttgactcgtaaacagtgtttccgctcgacatgactgcgagcgagagccctggggtcccgccgatgcgcatcaaatcttcgatggtggaccgcaagcgatccagtcgttccgggagttctgccattctgaatgctgctcgggataatgcgaccgttacggagtagagtgaggaggtcgactaagatagattgtgtagagggggtgcaatcgcgactatgaaatgattggctattcctatagttatacccgcttttcccaccaccctacaatacaacatagtctccttatcaagtcagctgatctgataccatgaagctatttagagattacatgatcacctgatctgtcactatgaagtaattgaaattaattctaccaccattaatgatagagataatttaactctggaaatgacaattgaatgctggatggtagacaatatataattgattaaatgcgaccggtatttaatgctagctatagcttgattgtacaaagaagttgaggtaaggactcagcggggtgtggcagttttcaacaactaccagcgcgggacaggggaatacgagagaatcaccaatcagaatgcgacaaagttcgagcatagaaaaggaacaccggggggggggggggggggggggggatcccgcccccccccccctggctcnnnnnnnnnnnnnnnnnnnnnnnnnnnnnnnnnnnnnnnnnnnnnnnnnnnnnnnnnnnnnnnnnnnnnnnnnnnnnnnnnnnnnnnnnnnnnnnnnnnnnnnnnnnnnnnnnnnnnnnnnnnnnnnnnnnnnnnnnnnnnnnnnnnnnnnnnnnnnnnnnnnnnnnnnnnngggggggggcatggatcgctgccacccgtccctgagtccaaacaagaagcctttttaatcactgaaaagaaagctgagatgatctacaaccccatgttcttcttctttgcctcccggtaatcgactcacaacctcagccggcttctcaagactaagctccacaatcttctcgttcccagagagcttccacgagatcatagctagattatccttacccagcgccaccttcgcttccaacgcttctgccaaccgtagcctgggcctgaaaaatatcttcgatgagccagcagcgaccggctgaacacctgccagctcagtacagtactcataaattggcacactcccccaagcatggcaatcagacctttgtctaacgtcgtcctcctcccaagtagaaagattattcgctagcatcccccgccacggagcccacattctctcccaaaacgactcgtacaaatcctcgccagccaaagaaaatgccctgaatgcatagaaccgcatcatatacgaacaccttgagaagcgatcattggtaaacgattcagtcaagatccgtgcagagtcttctgcccttgccgctccacaaataacagcgaagacctgacagtgctgagaatacgacagctcatcggcaacatcggctgtcgagtcggtgaagaattgcccatcataacaatgagcccgaatagcccctagaagcgatgccgccctcgcttcatactcagcagcatgtcctggccgaccaacatcacgcaccagaccagcaacattttgtagaacccacgcgtacaacatactaaaataagtgtgtctattggattttcgtccggaggtcggaactcctttgtcgggatggtcgtccgttgcaccccaggtcgtcacccagtcaacatattgccagacgacttcaggcagtccgctgaccagacccagctcgtcgatgtgggcatcgaaaaagtcgagaataccgtcgatacgcgggatgaagcctcgcgcgaagcgggtatcgccgaagtataggtggtggtcgcagacctgcaagacccaatacagcgagaacccagctatgagttgcggtatttgtgaggggaagcgggactgtgtgagaccttcgggtgtgattgaggctgcaaagtttgtaattgcttggcgcatcagtcggtcgtcgcccgagaggaggtagtggaatagaccaacggagcggctgtctccggagtatctgaattgttagctggggtatggatttggggatgtatgaggcatactgtaattgttcgtagaatgggcaatcggaatacccgtcgaacatgcagtttcgcattgtccggatggaaacggcccagatctgctcgctgtgcgcgtctccgggctctttccagctggctttgacggccatggggtagttgacctgagtagcggcaaatgataccagctcgattggctcggggcctacagtgatttcgatcctcagaagacgaaaggttcggaaccaaaatggttcgtatatgacactttcagtgtcaggaagattaagtgtcacttcatcgtatggtccgataatgtggccaacacttgcattcagccggtcagccttggagcggaagaaagggtatgatcgaggctcaagctcatagccttctgagtgtgtcactttgagtctgatctgagaagtgtgtttggctgctttgaaggcccatcgaaggaatgcagtcgaatggacatcggcttgcacttcaagtgtatgagttgagcttgcaggaaggacgatagagtggtttgttgcgaagaaggctgtccaatctctgacctcgatcacactgtcgcatgctctaatggtttttacaacggctggggttgactcgggcatggggatagagcgtggacgtagattccacggcggaatatcgccattgagggtctttatcttgtaggcaaatggtaccaccgcaggaccggggtttgtaggaacaacgcgctcgctgatctgagaaagaatgtcagtgcaattcaagagggcttcgatcctgagccattctcacatgaaggaacacatcgtcagccaatcctgtcggaaactcaatgctttcatccgcagatgctctccaattcttggaagaagcaagatcgacgaccccctcgtctgtctcgatatttccaataactgtcaagcctggaagagccgtccgcgcaaagggtattgcgctcctcgaagtcgcgaagtaccggacaaccgtaaatcgaatctcattttgtccttcttgcaggtagggtgcaatgtccagcgtgtcgtaataccagatcaaaggactgctgcgactcggtccgacggcaatatgtttcccgttcacatagagcttgtagcgtgtatcggctgagaaatgcagtattgatttcgtcggtcgcgacgacaagataacattccgtgtaaagtgaactatcttgccagctgtgttcgcgtttgaagagtcagtccaatttggaacccagatccagttagcctgaagctcgtcgattgtctttcaagccacaataagtcagcaatttattccatatagcttgagatataaggaaaataccttttgctcctctgttgagaccatctttgcgcattgtttccgttcatctcgggagttccgacgagtttgtataacttccggcggggaagaggccgggggttcggaacatctcacaacgagaagaaacgcgattgaattaaattagctaataagagtttgcaaataatagcttttaggctggggggatgtattcagccaatagttcatgaaaccgaagatgttgaggattctatcacaataatatatagaagtcgtctcttcgccgactaagggagaggaggtatttaaaaagacataacaaggtcgtataaggggtttaccattcttgtatagtttaatttaagtataacgatataaccataatgtagtatcgcttacacttaagctgcgactacctcatactcctcgcagctgcacttcagtgacataacccttgaacttccgaagattgaccttcttctcgaacctagaacataaaacgtgttatccaaatccattaaaaggaccccaggtggaaggttgacatacatctcatcaatctcagccggtgttcggcgtgtcacctctggaagaatgaaccaggcgataattactgcaagtgtgcctgtacccgcaaagctataagaggtaggctgtcagcattttgcagtggcaacccgcacttaaagaagacggcaaaagactgacaagaaaccagtttttacaccccagtgtgagataggcgcattgttgatcatcaagggcgtgcagaaactgaaaatgatagcgactaaattcgaggatgcaagagcccagccggctgtttttgcgcgcaaacgttgctgggggatctcagcggcgtaggcatagccaatagccgacgcaccagtagtagacaaagttgccaaacaagcgaaaaagatctaggtacagttagcaagttatccaaggttacgccgtcagaagggcttgccagaagtgagctggttgatggcttggtgtaatcgaagcagccaataattccgaggcataaaactgacacagatgtaactgcataggggtagattgtcaacggacgacgaccaagcttgtccgtcgtggcagcagtcataatcatagatatcaactggacacaagataaaatgaccgttaccgtgaatgggtctttgttgccagcatattgaactagaacgatattagcaaagtgaaagaacagtatgaaacgattagtactcacagaaatatgtagcgtaggtgttaaacacagacaaaccgacaagctgttgggcaatcttgggccaagctgcaataaagaaacgaatccgattgcggccctggaaaacagcccatggtccctcttcggagttacgctctgcgacggtgcgctcctctgcaatggtggcagtcatgatttcctgataggaaattagaactttgttgaaatacgattgacagaataatcacatacaatctgctcgtcaacgctgtatccctcgatattgccattgcaccgagttaggatcttggctgccttgtcgagccttcctttgctcacgagccaccagggagattctggggtgaaggcgaagatgatggcaatgataccaaccatagcccactgaccgttcatggcaattgtcagtcactatcttgaccatgaaagctaaatcacacacgggacaccacgaacctgtgtatagatagggactcggaattcatatgagttatttgcgctgagttccttgagtgccactgacgcgaagatctgaccaaccacaaaccagctggaaaagaatcagcatataaagcctctgaggtgcaatcctcttaactcacaaactgtaagcgttgatatagaaacctcgcagctgggttggggcgatttcggacaagtagagaggtaacgtggattgcagcataccgacacccattccagagaagagttttgctgcgagccagtgatcccatcttgttgcgaaagattcaataaacacgctgatgacaatgtcgagccagattatatagaacgcgatttttcgaccgaacttctctgtggcatattggaggaactaaagagtagttagacactcgccagattagccctgaagatcggaaagacgtacaacttgaccgatagtttgaccggcggattggataccaccccatgcggagatgtatttgcctgcaatgatggatgtgcctggggaagccatctgtcgaataaaacccttgttggagacaataccgccattaagattaatttctgcaaacagatcagtataattagaagctcataggtctccaaaagcagtagcttacggtaaccatccagcgatgcgctaaatgccgcggtcatagcaatcagcgagacgatcttgaaccgtcgcacacaatgccagacaccaaggtcgtcttcgcgagatcgcatgatgggccccatgctcttggtaggcatgacattttcttgatgggagaaggcatcctcgatgttttcagtgttggtcttggaactatccatcgtaaaaataagtagacaacagtgtgtaccgagaacgaaagttgtaagttcttgtcaaatgaacatgagtagctggtattgctatattatcagctctttggtccaacttagagagctaacaaatattgatttgcgaaggactcagctattccaaccaataaatctgaatttacaaggctaaacgtaattcttagaagctctttgttcttactttaccccagattatacatcaaatatacgaaaaaattgactatcgaatagaacgcaacccaagggcctctacccctcaaactcccactagccctaaacagagaatccccggcggcataacgcccataggagggaattcaacccctccaaattccatacatccccaaccttcggggttttcggaggaagactgcccgagctccttcccggggaactaaggccgagtaattacaggtaaaccagaagagcttccgaagctgcaacagtgaaggttgctttcccgccagagacagtgactgtctctatgctctctataccctgaataatgcaagtgccgttggcaaatgtctggcccgcaacggtcgggttctgaccctgatcgacccgagacgtagcatagggagcagtcagtcgtttagcagtaacgcctgaggaaaaaagcccagacagtgtatatatttgcgaggaccgtgttccgctggtagatatatagtagtcggaattgtagagaaggacccggacaggaacgctagccttgtagagggcgtaggctgcatatgctgtatcttggctatccagaggcgcaatctggtcggcgttggcgagcgccatgctggcgaagtaagcaccgtagtaaggggatcctatgtcgtagcggccccaccagcagtattggccttgaaagttagcttgtgggtgggtaagaagttctagataacttacagtttccaacggtaccctggtggaagtagagggcatttgtgcccatgaggacggtctgcatcacgtagtccaagatccagagcgcagcaccaaaagtcgggctgataccaccaccgccttgggttgctgaatatttttagtatttttatcaagtgacagtgagcagtaacgtacccgagttagtctcgccgaagatatgcggtttgcctttttcagcagctgcagaaacttcagtagcataaggcttgatctgggtggcaatactgctgtggcccataagagtagcaaggtcgtaggagccagatgactggggatagttgtgagagcaataatccttcacatagtcattcgcatcactctctttcgcggtaaggctagcgaggctcatgggcgaagtgccaaagtagacacctgctgagatgatatcagttgcagagagatttccgcacatcgcatcttgccaggtgacttgggatgattcatcagctgcagctgtccaggatacaccattggcaataggatcgctgtcaacgaaaactgaacgcttaattagcgtctacacaaccaagaataagtaatttgagacctacagttgggctcattccccagttcaatggagtatagattgttcattttgctctgggcgagaagcgcggccgaaattgtgttcaagatatcgtccaaacgacgattcaatccaattataacttctccggcatagcctgcagccaaagagatgaaggacggtccgtaagtcagagtctcgggcgcagcacctgtgctggccactgtataagtgacagcttccgttgatgagctattgtatatcgcgcggtccctgcgtactgttaacaacatttattgaccaataaaagcatacatactgtgttgtgcctccgatccgcataggaggccatgttcctgtcagatccttgaggttctgcagacatgtcatcgttgattcgacctcttgaatgtactcagggaacgcaaagaactccagacttcacggtgagtaattaaatctgccaatggcttagatagagactcacgatacaccaactggagctgcagagagctgctggctagaatttgaaggcggggatatcggaacattgaagctcaaactcaaagccgaagccgcgaggcctagaagcaaggctgagatgggaattgatgtcatggcctcaaaatgtcttccgtcgatgctagataaattgagttgtaagccaaagaaatttccaagacaagataaaggtcttgagtatacatatataggctataatgcaatccggtctctataaggaaacaatccggggaaccccacatttcattattttcaatcttactgtcgggttttagaatactcgtgctggtaaatatcaaggagcaattgaggataatataattgattgaaaaattactgcttcttttcccgttaaaatgaacaagggaagtcctgtactttgtatttcacagacttcctgtggtagcccaatatacattataattgtatccctgggcatcatagaaagggctcagtgtaacatgtcctccatcggcgatggagatgaagtcaagaccagaagcgccggagcgtttgatagagtcaagggcgagagtaggaatactactcagcgtttggtttccgtaattgccgcacaagatagttggcccataagcaactgcagcaatacttgaattgtcatttgcagccactgtacgcagactcatgggaaagcggatcacaacgacatctccatcggcccatatacgcgagatctgagcgtaagttccgggactagccttaacatcaggtacagcttttccattcagcgtcagctctgcgcttgatgtccatgtagggatgcgaatattcatcgtccagtgaccactgccgaagacttctagtttcgatttatccccgactgggtaagtcgtagactgtttcagggtaatacccatctccggccatttcaggacagaagacatgaacaagttgacaaacaacgtggagtcattgtagaagtagatcgagtccatcaactttgtgttcgtttcgagtgctgttccttgacagcaccagaatgagtcgtagtccgtactccaagtaccgccaccccaggcgggaccaacaccacggcgacctccggcgttgagaggagtgaagtaagtgatgtggccatggtgatcataagggttctgttggcccaacaggtggttgagtaaggcgttttcgtagaagtcgaaatatgccgagttctcggaatcaacgagccacagctcgcgagtcagcttgagcatattataggaattacatgcttcacatgtgtcattgtcaagataatcggcgatcgcatttggggcatggaagtgttcggcttggctgttaccaccgattgcgtacgtgtgcgatttgacatttatttcccaggcattccgggcaatatcaaggtagcgagattgtccggtggctttgtattcgcgagcggccccaatccactttggtacttgagtgtttgcatgtagactgtcgaactcatctatgtcggctgcaagggggtcaaatataacgccatgatcaaagcgttgggcaacggtaagccatctcttgtcaccggtttggtggtagaggtcagccatcacttcattcataccgccgaattctgtttgtaacaacttttgcattgcatcgtaactcaacggttcggtgcgtttgtcgacccagctggctaaggacagtaagacgtctcgagatatagtgtcttttgtcaagcgccagatgtcaaggaggcctgcaagagtcttgtgtaccgcgtaatacgggacattgccgtttgtcagggtgctgttttcgagttttgcaaactctgattctggaaagccagatacatatccgtccgtgaagccagcagccttgttgttagcctggcatttggccagctcggcaacaaagtaggtcgctcgatcataacatgtttggtcgcggagtaccgcataacattgagcccaggcactgaggaaatgaccctggatatgcgaacggaacggaaaatccggagcatcccagccaccattaggcgttgcttgttttgtggataatccgtgggtcacccggaagacgtagagtagtctgtcgacgtctatttctttcaaatatctcagggtccggccttggttttccaggaagcggtcttgtgtcaattggactccaccaagatcgaatgcaaacgcctgagctccaacatccttggtatttgagctggattgtccatcgacgggaaagggaagagaaagaaaaaagcagacgaatatagcgagaggtttccaccaatccttggagtgtatcattttgaattgtttgggcgaattgaaagtctggtagataacctagtgattcagctattctttaggcattgtctgaaacacaaggcccttttatataagatatttccggtgggataagacattaatcgcattgttgtatatacaatgccaaggatctccacacaagtccatactccgcaccccatacttcttctcaaatccggagaattcatgcggggatatattttgcggagaaatgccaccggactcattcatagtcttctaaaggaaatatgccggggggcttgtagatcaatttacccttaagagcggagaatatcaaaggtcaactaaactttacaagagatctctagcctactataattctaagccaatcctaaaagacagattaaatctgatagactacaagttgatatctctcaatagagtagtctgcgcgaagatttcttatactttcatgcttgtttataggtgatatctagtctctttggcgaggttgaagaaagttcgtggcattgtgattgcgatatacatgcataggtctggctttaagcaatataattattatcattcaatgataagaacgaagcgtttcgatttgcttgcaagtgataatgttgagaagacctattattagctaccaagtgacactaaatcaaataacaccgtggctgttgagatatggggttgccacgttactatgttgtcttgttccggagtatgtacacatgtgtgtatttcgattccgaagtatagagtcagagaaacaataagagatcccatgtagttttaagtcttaataccctaatcaaatataagtctcaacctccgaagaggatgtttcggcgaagtcaagatgccgaggtaaatctcaccgaaatccacttcgccttatcctcaaccactgttttctcaacaacttcgccttctagatctctaaatttggatcgtttgctttaattgttttttcgctctttataatttatgatgttccgctcttttacttctcttcctcactcttttcgcaatatttccctcccctccacgctctctccctcacgactggtattccgcaactctctacccgcaactcccgctgctccgaagcgattccatagccggtcttactctaccggtaagttataaacagtccgcgtcctccaaaaggagctaacccggtaatcgtagcaagtccctcggcctctatctatccacccccaccccaccaaaaccagcgctctcgtctccgccgctttatcgggttcaccacgatcgctgtcttcacattcaccatcgggcttacctatcaaacccaacgcaccctctcacgcatcatggcgaccccaaatgacgaggaggtcctgaccgcattccttgacaccgactccgagatcacggagatcgagaacacaatccgcactcaccccgtcgcagaggccctccgcgcagaccccgacttcagcgaatcgcgcccacaccttacaatcccgggccctctgcgcgaacgcaacctgacagccggaacgctagcaggacccggcaagattgtcgtgccgccatatgtattcagcgagcgcgagggcaagaccatgatctcgctcatgtatctcggcggcgatgtctgcggtcaccagggtattattcacggtggtctactggctacactgttggacgagggtctggcgcgttgttgcttccccgctctacctaataaggtcggcgttaccgccaatctgaatattgattaccgtgctccggctatggcgaatcagtatgtcgccctccgcgcggagactgttaaggtcgagggtcgcaaggcgtgggtggaaggtcgtattgagactctcccgattgatggttcggagcctgtggtcctagttgaggctaaggctttgttcattgagccccgacaagctgctgtaagttgaaaatgttggactttgatcttttcccctgactaatttccccaggcgctctcgagtctctacaaggtggcgtgattgggaaatttctgtcctttccgaaatttctgcatttggttctcgttcctggttcctggcgtaatggcgaattaagagaattagacctttcatatgtaaatggtattagaattgagtgaagaaatgaatattatcagtaatatcaaagactatacaagattacaagactataagactataagactatactatagaatatctctgttgtacagagtataagaacggaaaaacgccaagcaatggcgacaccccgcggtgatcacatcttcttctgtgacgcggccgtcccactgcccctccctatttctataacttttccgggatctcaactttcttctttctttaatccaattaacctccaaaatgtcttcgtgagtcccaaccgaacccccaatgccaatctatccaaaaaactaacaccaaacagcaacatcaccttccacgccagcgccctgacccgcagcgagcgtaccgcgctgcgcaaccagcaaggtctcacaatctggttgaccggactctccgcctccggcaagtcaaccctggccgtcgagcttgagcaccagctcgttcgcgaccgcggcgtgcacgcctaccgcctcgacggcgacaacatccgcttcggactgaacaaggaccttggcttcagcgaggccgaccggaacgagaacatccggcgcattgccgaggtggccaagctgttcgccgactccaactccatcgccattacgtcgttcatctcaccctaccggaaggatcgtgacactgcccgccagctgcatgaggtcgccacgcccggcgaggagaccggcctgccgttcgtcgaggtctacgttgatgtccccgttgaggtcgctgagcagcgtgaccccaagggtctgtacaagaaggctcgcgagggtctcattaaggagttcacgggtatctcggctccttacgaggcgccggtcaaccccgaggttcatgtgaagaactatgagcttcccgttcaggatgctgtgaagcagattattgattaccttgactccaagggttacttgccttccaagaaggagtaaagtgcatttctttgggtgcttttctttgggattgggatatgcttgagattttatggatgtatctatggtcggctttacataaaagagtcctgtacagcggattagatacggtttttttttgtgcttgattcccctcccacttgctgtacatactgcgtggacaatatagatcgcttttgcacttgcattttatgggctggggcgagaatggacaatgggactcgatccccttttgctattcgcttgaatgtgtggtcattgttgaaacgaagaaactaaaaatatccaatgctagtttgtgctagatgtaccaaagtggtatatgtacgcaacgtcttctcgcagctttctatctcctatgatgcctcaaattggccttagttgaactcgaattcataaaacacatacggtgtgtagtctgcgctgccctcgccaccggggtgcatctcgccaggatcatcccgctgcatacggcccttcttgtctcgcccgaaggcattgcctgccaggtacgagtatttgttctcgaggttttgctttgcgcgatctgcttgcttggcagtttgtgtctgtagaaagtaaagaacgtcagtcgttgccacggtgaaacggaaaacagagcagaagagaacatacccggaccaaagcgcagacgaaatccagcggcaatccataccgcagcaccgtctcgacgaacactctcagaaccaaaatgtgaatccagaccataacagcctcactccaagccgtgcgaccgagtcgcagcgtctcaccccataccttacgctcatcaccaccaacgcgctcgacttccttgcgctcctcctcctttccaccctcgacatacttgaagtcgcggggaatccatttctgctcacggcacttatgcaggaactcggcgttgtgtttcttgaacgctgtcacggcgtacagcgtgaactcgctgtcggaggcgactagctgcgcggaccgcgggaccaccattggcgcaacggtctcgtaggtcttgaggaagtcttttactagctgggcgggcacggcgacgaggtgggtctcgatgtattcggagccctggatgatggttttcgggtcgaccactgaggcgagggacttggttgagagattgcctctgtatagagcgggttagtcatggttatgtatgctataagcacacgttgcagtgccatcatagtcaacatacgtttgtttccgctgcagtgtagacagcgtgttcttgacctggttgtattgggagtacttgaaacggatgtcgttgtcgatgctggccgcttcctatagtagacaaaagcgcattagcatataactccaagccagatatattcctcgtttccatgcgcggtgcaacaaaccttctgcaagagatcaatcagctccgccaagggcttatcggccctgtacttgactttgttccattggaaagtacgtaggtactgatcgaccggctctgtaggcagtcagaaccagaatccagacatcctcgcagactgtgttttcccctccacagccagatcaataccaagctggagacatactatcgttgacgaccttcatctgctcaatctgcgcctcgtcctcaaggatgttcttcaacgcatcgctgaccttggcaacgacactctgacacgaggcctcgagcttggccagctcgtccgcctgctggacaagggcatctagcgtgccgatcttgaactccgggattgggaaggagttggtggagccattgtccgaggagacggtggtcgagactgcttcgagggcgtcgtcgcggtggtgcgaggggacgatggaggtagggagagaaaggaggatgtatttgcttggtttggacatgattgattatgtattcgcgggattcaagggccttcgacgaggcttgggtgcgttttcggggttgaggggggctcgggtggcctcgatgtcgtaggcggtgggggcttgtaccactatgtccactctgccatttacaggaactcacttatacctccattattattgacatgagacttgggtaatgatcgcattggccggaaattagataaaagatattatattatcgatacagcgatcagaattcacgaagaatccctacgaaaagctctccatgtgtgtgagtatgaactaagagaacgttcaatatgaaaggaaagatgcatgaaatcatgatctcatactaaagcctgaataaacgtacatgaacgactttgcagctgcgtgaactgctgaatggaggtgcataacataacgctagaacacgattcaatgctcgctcagagtcaaaaaacaaacaaacagtaaaatgcctcaatggacaggaagtaaaccacacacgaggaatgttggttaccaaaacagccagtgaggctagattgaaccatagcgttagctgggagaacaggttagacatgaagaaagagaaggcaagacagggtatctttatcgagcgtacagcgctcgtaaaccaagtagagaagtagagcagaggtgagaggaactagcctgtacaaaagaatagggggagaaaaaaaaggttaaagcgcacgtgggattagtcaaagaaaaattgatgattagttagagattgtacccaagaactgggaaagccgaggcacctaggcatgatggtaggattatgaaagattggagtggaagtgagtacttgggaagagaagtatgtacttcagccgatcctagccctgctgcataccctgaccctgctgcgtaccctggcccttctgcataccctggaaaactttctggcagttctccaccaggaacttgagaacgtcattcttcttctggacgtcagtcatctcacgagcgagactttcaggtcgcatgattgtcggcgcaaagaccactgcaacattctgactggtcatcagattctcttcgtggcgatcgacaacgcgtttgagatggaagatgaggaactccaggacgtcgcggtgcacgcgaggcagctcgaggagactcttctgcatgagttcaattcgcgcggacacagggttaacctcggcggaatcgatcacaagttcataaacttcgtaagtgatcaaggggttaggaagctttcggaaatactgtttcaaagtggatgtaacagcatggatatcgaggtcgggatccgagatatcgtaatcaaatggagagcgttcaaagccttcgcggatggtttggatgacggaagcggcaccggacttgcgataaattccttccatgtccatgcctgattgtatatgttagtataacgaccaaccggataccgacccacaaaacatacctcgcagttcaacctcctggatacaccgcgtgacgatggctggaatcatgcctttttcgtattcctggcgagcctcgagttcggtaccgaaaagagctgcgagagtcattagcttatactgatataatcctgaactgtagtatcgggcacataccatcgggggcagcttcaatcaacacaggcacgctgtcagcttgcgacatctttcctccctgcttgcctctctggtttccaaagaacccaaagccttggcgactcgggtcctgagtctgggaacgcggtataccaccgccaccctcttgtccctgtcctccttcgctggacatgaaggctcccttaagacccttgacacctttggcaacgttctgtccgccctttttccagttgaatttgcgaggctggcccttgcgaatgctgacaacctgggggcctggcacgacagtggctgtagcagactcggactcttccgaaatgtgagtagatccgtgatagtcgttgaagggaggtttcatgacctcaatggaggttgtggatctctgcttgttgtgcgatatgccgaggccgttgggtcgcggttgaccgtccgtggctttgtagagttcttgaatctggtgaaccaactgattgttcaactcagctagctgtgcattcttcgaagacaattgctcgaattcctggaagctcttctcccgtcgaatgttcatggcttccacttcctccgacaggtcattgcgcttctgcatgaggtcttcaatttgtggggcaaacgagtctttcagcttttgaatggactcagccagctcgcgcagcacatggttggagagtttgccgaggtccaatggcccactggggccaccacgtttctcagcctccatatgatcagtgaggactgtgagctcacgtagaacaatctcgcgctgagcgtcaaggacaaccatggtagatcgcttttcagaaagctcggtgttaacctgcttgacatctgcggcggtacgagcggctgactcgagttctgcaactcgcagacgttctttgcgcagttcgttgcgaagccaagagatctcttcactctgtgatccagtgatggggctgccaacatctgttccggcgatgcttcgagtggtaggtgatcgaggattcttgagatctttgctgatccgcacactcttctcactgtagcttcgaccatggcggacagagtttgagacgcgccgcagaaacgactcgttgttttgcccaacggtgtcatcgccaccgatgatgcgcgataatccctcgtccataggcaagtcagctccataccgtagcacgggcgatgtgccggcgccatcgtaatggtgcgattcatgcggtgaggtgttcaaggcagtatgctgaatgggctgttcgaaagtatcgctacggagcataggcaagtccccgtactgcgaggatgcaggtgacgatccgacctcttttctcggaatttggtgaagcttgctttcgagtgaatcgccgcgctttggcagatatggcaagccggagggttgagagcgcggcaagtccattgaaccgtggtcgtgacgatgaagctcattcgaggaacgagctccagccgaagtgaagtcatccattggaatgtgtcgctttgtgtcaccggagaattcttttgatctggtgctgtcggggctagtaggcccaggaaggttgctagtctctctgaagctgattggtatgtcggatgagctacgagtgtggcgaccctttgcaggcttggatgaatcggagcttgataatggtgctttatcgggtgaagttgagttgttttcttcccaacctttctcctgataggcaatatggggagaatgattatcggaagatgttcgagaaggaggttcttgtcgatattcacggccgtcgtgggacgcttgattaaagtagtcgcccggaggctcctgccgtgtctgtgagtgaccacgggaggaattaccctcagctgaaggatcaaaggcaagaggaattaacagttcaccgccatctgcatctgcatcggtgttgtgtgaaattgattgacggttgctgcggtatgtgctggagggaagaagaatattatctgtgtgaatggtaagtaagagctcgtgaccgggcgacaagacaccgcgcgagaagggttccagccctgaacgcgcgaggttatattcttatagatcaataatgacaataagtatatgcggtggcaacgatggtgcataaaaggatacaaagcgctgcaaagaccacacacaatgtgaccacatgtgcacgatatgacaataaggtgacaaaggctgcgatgattatacatctagactgcaacaagggtttcttacctgaatcagcctgctgatttgaaattgagcttccgggtccttcatcatttagatcgggcgtttccgccattttactagggtcaggcgtgcctgtatattcgctgttctcctcatcgtttatttgcgattcttcaaggaggtggggaggcaacgagggcaaggatttgtccagcttcacattaggtgctgctggttttttcccactactgccgccggctttccgttttctcctccgtgccattagcgattcgtgacattccatgcagaaaataccctgcgaagtacgcgcatagcgcaagttctcaatttttcgcttgcaatttcggcatcggaagcattgagcacagaaagcctggtctcctgttaagatggccaaatcctcaatcttgttgttgcaggagctacaactgtatgtgcagttactgcatataagtgatccgtcgcccaaaaggaggaggtgcgcatccgaatccagtagagtgttgcatgtactgcatcggaaacagtcgatgtgccatcgatttccagctgccagaggttagcgacatgaagaaaatggacaaaaagaattcccccgcaatatcccacataccaagctcaaatgcttttccttcttcaagggtctgccaggacggttagtcaagctcctgtccgctcactccacccacagtgtgcctacctctccacagcccttgcatgggtaggactcgtcctgctccatagactccggataagcgccctggttctccatcttgagatccaccgtctaccgcgcaaaatgtaaggtcgactatggccgtagatcgatccgaatataagtctggcgggggcgcagacttagtccaacaattatgtgtatccgggcgattcgtgatcgctacagaagatctcactcgcagtcacatgcgccgttggtgctgctggcttgaagatgcttcttgggcgtaacggcgggacgccgatattagggagatagggacgtcggtgcgggtttggagggggagatgcaacaagtgctggaaggacgaatggtggctgaatctgcagactaccgaggagttaaaaacgtgatccaacactaggtttaagcgtaagacaccagtccgcccaatctgtcctgaactaagacaagcaggtcggactaggatgataacggcaatcatttgcctatgaaccaaggatcatgaatatcaatctctcgacataccaggcactgctagccgtgctacagaagtgtttcagataaatgatcgcggatgttgtgatcattaagcgcaacaggcgaagcgaaacggaaattgcccctcgcgggcgttgaattggtttggagattggacagacagaagccccgaggcaaaaggaaatgagatccgggagttaagactataatggaaaagaaaaagaaaagaaaaagcaatgaaacatgagactgggattagggggttggagggatgagaaaggagagactagaaggtgaacttttggctttctgccacagaaaggtccttttccccacgtaacttacaatatcatcatattaagtactctatcctctagcaatctttttcctttcacgcggtatagatctaatattattgtgctctgtaactgcccgacctatccttgtctaaattgtaccttaacccctagtatgtacgctggtacggagtactttgactgaggacgcgcagcccagaacgtgcggagtttcatttccccaatgcaacgaccaatgggcttcttgatacccctgaattttgtatctgatttaatctccgctaaagtgataatgaagagggtactccgtacggtactattgtattctcccaacaatatcaacccaattaaaaagccaccgtctgtgaaagaggcccaagtcagcttctcctgggcagcttcggatctggagcatttcacctctgaggatcgctccatagccccagtgttttgaccacggtacgagtattttgtctcaaacacttctcacacgctatctccggccttcggtccttcattttcagtctctacaccgtagtttcccaaagactccggagcctccatggagagtttaatgatattcccgagaagctcaattacaacctgaagacatccagccttaagggcagtgcctacattacccctgatcctttatattgaagcccaggcctcccgtgctgtttggaggatgtgaaacacttgccgtgtcacgtgagagtcaatgtatatgtacggagcctctattaatagcccggctcatcttttcaaacactttaacatacggagtaaagttgaacgaaattaagtgtcgagaactcccagtatatgtatcaggattgtctcagggtgtgtcaggtctaccgaatgttttgggttgcggtactgtatcatgttctggacccctaaaacaacgcctcgcaaatgaaatacatcataggcaccattattgtaaatattcggtgtgtattccatactccacggtggccaatgatatactgggtccacttgcaattacatatcaatttatcttgtaccccgtgcatacaacatagatctgggaaatgggtatctctacttcgtgcattgaggcataatgaccacccacaaagacagtttacattcctagcatataaagtgtaatactatccaacatgtgttcgtaaaatgaagaataattcccatattaatacacagtaccgtttatcaagtacaatatgtagttgggcacgtaccactggcggatcggcaggagtggagtttatacgcagccatgacatcttctcttcttattttgtacgcttcttcgaccgtacaaatccagatgttaattcacatgcctgactggcaaaaacaagatcaacgtattcaaacgtgcaagtatgggctcttaaaagtcccagccaccgatgatccacaaccatttaatgatgggtctgcaatgaaatccgttattgaaagggtgacagggctctccaagtggcactggtaggatatagtatgatatgcgcagctgcccgataagaggacccgtgcctggcgtaaggctgagaatccacattcagacgatcagactacaatgtctgggcataaacaataaaggcccacacccccgttctgtaaattttataattcgtctcttgtcgatcaaagtcgggttcatttcaattggatcaaacgctgacacttggattacgttggtatattctaggtcagttggtgcattagacgtgcgaagatcctgcagtccttcatgcggcaattgcaatgagtgcgcgtcatcaacttgaagaggttcaaacggaataaatcgagaatcgagaaagtatgcttccaaggcgataatgcccatgaaaagagtcttaacggtaaatctttggaacaggatacatttttttgacatgtaaggaaccacttagggaaatgctaccagatgcgatacagaaaggatcgcatgttttcgtatgagtagggaatcatacactcgaggattccaaccactcggagacgtagatcatgtgaccacaatgaggcttgaaggacccccactttagaaaattacgaatcagcgttgcccctcgaacctcacttcttctttcatctctgactttttatcgtctcaccttaatacgaacgaatttaaaatgggtgtcgagagaaagattattactcgtggcaacggcactgactcgcctgcttcgggtgacaaggtcgctatccactactcgggatggctctacgacgctaagaagtccaacaagggcttccagggcaagcagtaagctgactgccatacctagagtcatttaggttatgaattgagtattttgtatactaattattcatcccaatagattcgatagctccagaacccccggccgtggccctttgactgttcagattggtgttggacaggtcatcaagggtatcatatcctcttttttctctctctcaatagaatcattcagactttcaattatttaacttcttcacattccaaattggatgctaacactacctctctgtctgattaggttgggatgagggtgttttgcagatgaccctaggagagaaggcaaccctgatcatttccccgtgagtaaattccacatcgaacaagagaatatcggactaccactaacatatttctcagggactatggctacggtgacaagtatgtgaacacactcgacatactgacatccgttagctgaaaatgttaacatttcgtttctacacagggcagctggcaagattcccgcaggctcgactcttatcttgtaagttcgtgcaagtggataatgctatcgggaaactaactatgttacagcgaggttgagctccttaagatcaacaacaagagcgcctaaataagcaattgaattgagcagacaagcatggcattgtcagctattcactgcgatactgctcacatcatacagtacaagttaatcctcatctgggttgcgtttcattgtacagagtagagtgttggtaggtaaagcacactggttaggtaatagagctcgatgaagcctggaaagcgccctctctgtccatcgagtacaggtatgtggaacaataaagatcattaaaagtcgctaaaagatgtatgtacatatgccatatatacagaacgaaaaagcagagtgaaggccgacctagagacggtgttgaacaggtgactgaggcgccggagttgggaccgagtttttctcagcaggctcttcccagcgcaagatacgagccattttgttatatgagtcgataccgcggcgagcgtggtccgcaggaacaaatggatcggtctctccgagagttcggctaaagagttcaagagaaacccagccgcggaagccgagatcttcgaagaagacacgagcgatatccacaatgggcagataaccaccacgcgattcctcaaggggaaatagacgagcgttacgggaccaattcatgcgggcaggctgtccagcgacatagaaaggatgcttctcatccaacggggcggaaagacgctcaccgtcaacaagctggacatagaagatcttggccgggtcaatattggcaatgcgcaggcgctgcaatgaggcagccaagtccgcagccgcattgggggtgcgacccgaaggactagcagggtctgcatatacacgaccggcgatattgaaggagtcaagacagagaccaaagttgcgacgattgacatcacggaccacctcccacgaggcctcccaggtatcaatgtgatccccccaacagagagcctcgtagacaaagcggaaaccagccccggcgcccaaatctgctaagcgctggagatcacgaacaatgactgtgcggtcgccagtggtgcgggcagcaccggtcttcgggtctggacctaggaagtttgacggaatctggatcatgtctgtgcctagcgcccgcgccagtgtgaaccatttgggaagtttctcattgataagccgatctgactccgcgcggtcgatgaggccctcgtacatggaaaatggctgcaggcagataatggtcagccctaggcgcttacacatcaaccgtgttgaccgcgcggcttcgtggtgatcaccgctaaatacccgctgcgcgtagcagtctagatcgtcgaagaagagttcaatgccctcgaagccgtgggctgcggcttgcatcagcttgccgggtaggtcgtgtacccagggccgacctaaggacattgaggcgatagcgggacgattgaaagccatttggaagttatgaatgggtacttcttttctatgtcgatattataaattcaaaaggtgggttcgtgtcagtctttcttctctttttaggaaagtttgcaagcggagatattaagggagcgaggatttctcaacaatattaggtgttttctaggtatcaaaagggaagatactaaaatgattgcgacaaaacgttatcccctacggtgctttctatgattgaacgtttttcctggtctgctgtgattcgtgtcttgatgacgaggccgaacctgatagagggtcatatgtctgggtaaacgctgacccgctttcgttttcccaccaattccaccacgcctggagtgcactgttccacccaccacgcggaattttgcttccccattaaacatgcttcctgcccacctgtccttagaaggaaaatacccgtagatacccggcaaggtttttaccgtgctggtcggaatgtaaccggagaaccggtgccgaatggtcatgctactcggagtccggcgcaataataatacactttctgcttcagctctacgggttacaacgggtttgaatttgttcaattctttcagaaccgaaatctgcttttcatcccaatcatcgccatgtccgtcaaggttgccattatcggcgcaggccttattggccctcgtcatgcgcaatccgtaatctcaaacccctcaacagagctaattgcgctcgttgacccaatgccggctggcgaagcaaccgcatccagtcttaaaaccaactactacccttctgtggcctcactacttgcatccccccaccgtcccgacgcagcaatcgtctgcacaccaaaccacacccacgtccccgtcgcaaaggagctccttgcaggtggtatccacgttctccttgaaaagcccgtaagcgatacgctggaaactggccgctccctactagagtttgcccaagccccagagcgcgcccacctcaagctcctagtcggccaccaccgccgcttcaatccttacgtgcgagctacgaaggccgccctagatgctggatctctcggccgccccattgctatcaacggtctgtggaccttgttcaagccagatccatatttcgccccgccaacagactggcgtgcatcgaatgagcgcggaggtggtgtcatccccatcaaccttgtccacgacatcgacctcatgcaccactttttcgggcctatcgtgcgcgtgacagcagagcgcacgctgccacagcgcccaagcccaccacacaatgctgatgaaggtgctgccctgacgctgcgcttcgcatcgggtgttgtcggcacgtttctggtctgcgatgcgacgccgtcgccgcataatttcgagactggtacgggcgagaacccgctcatcccacggacgacgactggcggtgactctgatttctatcgaatctttggctcggatgcttcgctcagtgtgcccgacctgacccgctggagttatgatgctagccctgagaagagctggaattcaccattgactgttgagcggattccgcttccagatgataaggcgccttttgacctgcagcttgcgcattttgtcgatgtcatcaatggagatgcggcgcctagctgtactggtgaggaaggtttgcgtgcattgattgtttgtgaggctgttcagaaggctatgtggtcgggtcagcctgtggatattgatgttaacttgttggcaaaatcggatgactagttagctacagactgatgtgagtgtgagtttactgatctgtgaggtgcgtgtgtctgtttgatcttcttacaatatgtccaaaagggggatgacaagacactaaggggtatattcattaggtcatttgcttcttttaaaccagcacatcctattacacgcagaccacatgatgtgcaatcctaaataattgcgagcgcggtttggcacctcgtccgacaacaaaatcacaacgcggcaaaagacaccaacacggaaatgattcaccaccgcatcgttcaagcgtactttggctgagccgaagtatcctcgacttgctcagtgcgcatctttccagtatcaatgccagcagcctcgacatcgtttcggaaaagctcttcattctcacgcagctgggcgaccatcttcccatgggcatgccgcacgggcttgatgtcaaacagctgttccatgctctcaagaggaatacccttggtttcagggacgaggaaatacacgaagacaatggagagcatcattaatgatgcgaagaagaagtatacgccgtatcccatggctgtgaacatctgcggagtgaatcgcgagacgaggaagttccagagccagttggaggcggcggcgcaggcctgtgccatggaacgcatgttaggatcgaacatttcctgcagatgctgttagcaatatgtcttaacgcttgtggattgattaagtactggaacaatgttcaaatactaatgtgcggatgcttaccgagttgaggacccacggggtaccgttccaggttggggtatagaagaccgtccacaggtagaagaaaaacatggctgcgataccaccgctgctcaaggactcgcttggattattttggggttgggcaaccttgatgtacgcgccgacaatccacaaacatacggaaccacctgctgcgccaaccaacagcaggttacggcgaccgacgtgatcaatcaaccaaagcagccaaatgaaagtcactatggtcttgactacaccgaaaattccagtggtgaacagactggtgttggtacccctgacaccaatctaaaagcattattagcgtcagtcatgaatgctcacatggatcgcaacaagattgcgacttaccgatttgaagacagtcggactgtaataattgatggcattgataccagatccattctgccagaagaacagcgcgcttccgaggaatagacgccacatgactttcttgttggtcccagccgccttgaaaggtttccagaaaccaatgccaatattacggcgctgctcatccagggcttggtcaatagcaccgatctcctcaatcatatagatatcgtgctcgggcaattggcgtatccagcaaagatttttgatagcctgctcgcggcgaccgcgtccgaagagccaacgaggcgattcccggatgaagtaggcaccgatgatcaagagaccagaaggaatcaactgaatagcaaaaggaatgatccattgcttgtggctaggtgccatggtctcgtcaataccgaactattgatattgtcttagtatccacaaaacaacccggacacaaacgaaaaggaaaactcacattgatccaaaatcctacaagaccgccgatctgccagccaagctcatacacaccaaccaacctaccacgaatagccggaggagccaattcggagatgtagattggggtgatgttagatcccgctccgacaccaataccagcgagaactcggccaccgtaaaggagaccaagtcctcgttgaccattagcaccaagcatgataccagcaccgagagtgaaaaccaagccagaggccaacaggccaaccctacgaccccagaagtgaccaatgggatacacgaacaaagcaccgaagaaggcaccagcctggtagcaggatacgatgttggcgctgatcaggttcttggtagtagtagacatgtcgtcgaagtggaactcactcttgaaggagtcaagagagagcgtagtgccgatgaaagcactgtcgtagccaatcatacaggatgtgcatgatgccactgctgccagaagatagattctccagttataaaccacgctaggcgtcggccggtcctcgaccagcttcaggatagacatggcagcgattcaatatagaagaattgaagaggaaatgcaagagcctctgtgaccagacgacctcgatccccaatgctagatgcagagaggcagtaggatgtatcaagagatgtatgagatgcaggtgcaagcgcaaggggagagaagaggaaaccaaaaagaaagcctacaccacgttttctcgcgagggtgggcaagatataaataggaattgccccggactgtcgattcgcccttggaaaaagagaggacagaatctggggtttggaaagggggagaaatcgtggggatgcggagtcggagaaaggtataggacaggttctcgaaatccgaaaaatgaagaaaaccaaggcgcggcaaaacgaatactctaagttcttctgtgcgtgaggacagttgcctttgttgcctcttggcacctacaatgtggcttgctaccaagaagaaattgactcagagggacatgcaaactctgccgggctgccacgaagtctacaaaccgagatcattcgcttaagacgttggattgtggagatccgatgccgctgggagaagtggggacttccccggcgggtttccagtaacccgcgacagcgtgcatggtcagctcgatctttctggggtaccccggaggcaatgcagtggacgatctagccctggtgtgaaatagcgaatggttattggtctgataagatgaacggaaatggacccatgactaggggagggagaaaacggccaatgaccgattgctagacatgggtggcggggaaaagcctttccccggaagcttaaggcgaggcgcggccactgtgaagtaatccattggcgactgtctgccggagcaattatcagttttcaagtcatcactcgtattacccgcgttattttcattggctcctgtaaagttccctttatcgtggggtagaggtggttgttggtggctgtagtagtgggaaatcattcagcccggcagatgttctgtcaacaatgaagcatcgacttttcatctcatgaaagaggttatatagaccaacaagcaatcatttctcctcatatgtagaatatgataaaatgatatttctcgagggaagtgggataggtgaaagagtagaatatttcgttgtttctccgacggcttatcgctttctcgcagattccacgacgcctatttgataggtcatgtgatagttgtatcaatgtgatcgtacgtaccagagtagctattgaagagggtatacgatgggcagtctggcctagcagataagacaagggcgacgcaacaacactaaccatccaaggaggtcagctagcaagcatagggaccatacagaccacagtaattccctctatcttagtggagcaacatcatataaaacccttttcattctatgggatcctatacgctaagttctatctgacaccctgtctgaaaatatagcaactatctggggtttccccactgtacgggatcatcatgtatctgtcccatctttcaggcagaaagaagtcaatgccaaaagaccgggtcacgtgatacgcacgaggcttatgatttaattgcttcgcttcgctccgcaattagtacagatcaggtaataagtgatctctgaatacattcgttgtggcttcatagtgggaaatggctcggttcaatcttcccccgaactgaaatgtaggaaagccgccccacccggcagaggaaatatccatggtacgtatacggaacagtgactagtgaggctaaggattttccgtctgaatttcgaatttcgtcttataatattgtaggctcccttctgcatatctcagaaggtaaatatacacaatcatcatgtccgtcacagaaatcaaccaaacgcagctagaagagcccatcgccattccctctaaccgcgatggcgtcgcctacctgtacggtcaccctcttctgaactcgctctccccgcctctccaccagacagtctacaacgcgctcggtctcaactggactcaaatccccttatctagtgtgtctggatcatcagagacataccctcccccatacacacggtcgccgccgattgagaaatatctggcatcgatcaagtcgaatccgaagtttgtcggttcgtccgtgacaatgcctcacaaggtcgcaatcatgccatatctcgacgacctcaccgaacacgcccgccaagctggcgcctgcaacaccatcttcctacgcgaggacccaacaactggtcagcgtcaatacgtcggcaccaacaccgactgcgacggcatccgggaggcccttacacagaatgcacctgacccaacacgcttccgcggccggcccgcgctcatcatcggtggcggcggcactgcccgcactgctatctacgttatgcgccgctggctcggctccagtcgtatctacatcgtcaaccgcgacgccgccgaggtcgccgccatcctcgaggaagaccgtcgccgcaaccctgaccccaatgctcaggctcctcttatccccgtcactgaccccgccgaggctgcccgcctggaatcccccgcggctatcgtatccggtatccctaactatcccccgaaatctcctgaggagctgcgttctcgcgctatcattcaggctttcttgggtactgctgcaggtgcggagaagcagcagggtgtcatcctggagatgtgctaccaccccacgccctggactgagatagctcacctggcttctgttggtgggtggaaggtcatcctaggctctgaggctttgatttggcagggtctcgagcaggcgcgtctttggactggaaaggatgtcatcgggacccctggcctcgtgcaggaggttaaggatcttgtttccaagaccattgcggaacgtggatctgcgaaatctaccctgtgatttcttttatacaatcacgtttcgtttttttttttttttttttttttttttttttttaaagccccaaaacccctggcctcgtgcaggaggttaaggatcttgtttccaagaccattgcggaacgtggatctgcgaaatctaccctgtgatttcttttatacaatcacgtttcgttttttttttttttttttgatcattgtatagagcccaaaatagctgctagttgcattgtgtatatataatagatggtgtcctcattttgtaatacatctcaatatgtatatctgtacgtctcatcagacctatacacaataaaacaagatcaaaaggctaagccattcaagctccgggtcgtgagtattccagattacggactcggcgccagacttcgcgtactgtccgctcctgtgtttcgcggcctgactcggttgcagatgggccagcgggtctgaaatgtcattagcaagatccaacactagaagggaaatcattcaaagacgcacctaattgctaaatacaacctgctgccaagtcggacatcttcgattggcgccgtatccacattctctgggggattagcagtagtcataagtccaccggcctccagaagaatagcagcaccagcagcgatatccctgtaatagtcagcctcagcatacctatcttcgactctccaagagatagaagtagaaaaagagaaaagaaaagcaaaactcaccactcccaacaacctccctcccaccaaatatcaaaagaacccattgcaacatacgcaagatcaagcgtcgcactgcccaaactgcgtacaccatgcaccataccacctctcccattccgactacccacctccgcagccatattaacaaaactctcaatcttgcgatgcatatttccatcaggaatatcgcggcggtctttaccccactcgcaagaaaagatacactgtgaaggcgcattggcaggcattggcggggtcgggttgtggatgagcggaagacggcgagtctcgtttagccaggctccgcgcccgctgcaggaggaccagagctggtctgtgaatggggcatatattacaccaattactggcttgtgttgcacgatgaagccgatcgagacacaaaacatggggaaaatatgtgtgtagtttacggttcctataaggtgggttcattagttaagtgtcggtttagaacaatgagcagtcggtcatggcttcagggtcctgatttttaccatctaatgggtcgatgcaccatgttggttgctcgtcaatgaggtagtcgcgcgactggcctttggcataggcctcctcgccgaggaatctaggggtctgttagtcttgttgccagcagattttggtaatgatactaacttgtgagaggggtatcttgcctcgagggtgcttcggatgaatacttcgacgtctgccaggtaacactgtgagcgagtctgatatgccttatcggctatgccgccttaccttcgtcggtttgtgtcacaatatctactgcgttttccttttcctcaaaggcgtaagaggagccatttgcgcctgaaatacgctggtcaacacgctccatgagcatcttgcctgccttgcggcccaggtctactgcgaaagcgtatatctcatccagctcatctcgggaaaagggtccgacggccatggtgaaacagattaatggggatgtgtggaagcaacgtctcaaaatatgttcagaagcaaggtcgaagggaaaagcctagcttcttgagtcatccggtgaaaattggtgtgtccaaaacaaccgtcactaaccgacgtcgggaattgcttatcgagacgtttccccactttatggggaaatttatagcttcccttggcgatattactaaaactcgtagttctatgcattgctgcttcacttgactcgctactaattttctctcttctaagaatggtatgaaaacaacggattttgcctccccagtcaagcggaagtcatcattttccatgatgttatatgcatgcaagtccctgtatactgatcaaaccgaacagcataccctggaatcatagaccgcatgatgagatagtcgatagcattaccccatttagcggttccattcaaggttcgccggatacctcgatctaggctttctgtgagccagtccgagtataggcatggttgcactatagtaaggtcaggaggagcccgtgcagtccacatttggagcagaaaatcagtcatgtcatttagaaatgcttcgcgttggatctgaggaatatggagatttcagatagtcagtggcgtaccattgaccctttccgaatatatgaccgggtgttttgggctgagaaaaaggcttggtgctttgattgatgtacattgttctttcaaacatcagaaagttttcactgcacgtagttcgtttttccaattattggaatcgtgaccgactcgagcagccctctctacagtatcctcaaaggcaattttgaatggtctgtaggagccgccatggcggggtgttttatcgccaaaggaggagggaacccctaggcggagttggctggcctccgagagaagatctggcaagttcaccatgctgaggcttttaagtggtctggagctgatgtgaagcggggggtacgggggataaatggagagagaaccggtgagtgtcacagcgccaaggctgtttgcttgtgacgcaacggccaatagatcaggacattgatccccttactgtgtagcaacgtgcgtgggctgatcctagtttttgtattttatattatatttgcgttgaaggatgtgtttccagttgacaaatataatgggtataatatatttcgtgtggcttgtcgtcttaaaaacaacggcatctgcggcatacagttgggaattccactgatttgatacatgaaaagaatgtgaatacgcatatcttctggcgtgggtgtgccgccgactttcctttgactcattattatgctgagtctgaagatttaagaatactcttgcatctaacattgattggatcagaagcaagccaacgaagtttgtattgtctgcggcaatgtgtcatcagatacagacggggaaggaatatcccaagtttccttgtatctgaattcgtcatggcacagattgggcagttcaccactagctgcggttgatcatcattcatagaaatagctggccatattcaagtcggctgtccatccatttgctgtaacctgtctcgtatcgcttcatgatcattattcccttcatcgtctttgtactcttgaagcacaatgctccgcataacgcgcctaggagcgcggcggccagtgaacagttcaaactgagcgaagccttgttctggcagaacatcaaggccatccagggctacccaaccgcgatgggatagggctcgtgtttgtttcatgagaggggtattgaggggcttgtatgcgagctaaaatcattggttaggaataaaacaccattattttgggttggtacaagagtaaaaaggaaacttacgtcaacaacaacgccacctgtcgggctctctagccattgtgctggcatatggaaattaggtgctagctcgccgccaatgctatgagccggaattcctgagacaacgatcgtcggctgtttgaaatcggcaggccaggggtcggataatgaagcaataatgcgaactgtgggacggccagacccgctggcttcttttgagtgtagatcttgccggttgtagtggtgggccagtctttccgcattggcgatcgtacggttgtagacaaagatattttgcacaccaagatggatcatggagtaaattgcagcacgggccattccaccagatccgatgacaagacctgtcgatgatgagcgtatcgcatttgccggagacagaccgcggcgaatgcaattgcagataccaatccaatcggtgttatcaccgtgaagtcccttgatagggccggcacggctcttttggagaaagactgaagattcttgaagacggttgtcgtccaggtcatcaaggttgcggatggggatgagggtattgacggcaccgatagctcgtgcatgcgcagacattgagtggaggagagggatacactctgttttgtatggaagactgacactcgatcctccgaagtattgattttccacaagttcatttaatccccgtagagtaggtgattggtgaatggagtaattgtgcggcaaaccgcagattttgaaagccgtgttgtgcatcgcgggcgacatactgtatgtggtgttggcgccaaagacgaagaattgcatcgggtccaaggcaaatgagctatagagcgccttctgcacttcgcgggctgtgatatacgatcgtaggtgagttggaagttccgttaccaaggacggatgtgtgactggggagagaataggattgaagcaacgagacatgcggccaagaggaccggtgttataggcgatcagcgaaatgccagcaactggcaggctttggatgcgatggcgaaatctttgcaccgcgaggttgtcttcgggtgtctcagccggttggcatagtcggactatgtcgcatcctaggcttttagcccgctcataaacttccatatactcatcgccatcccaacccccgggcagaggatggaaggcttcgaagtggccaatgatcctggttcgtccacttgaggagatgatctgggaaatgatattgtcatcccgggtgaggtcaactgtgaggaaaccggtggagagtcgcaagccatggcggacgaggtttaggtacgtttcatcggtacatctcaagggaacttgattgggagacagagatcctgtaggggtggtatagctttccacatgatatatcaacggcacaatgatgttgcgacggattgttgctaccgcctgactaatactgtccgcaagacttgagctgaggcctggctgaccagaagagtctgttacatcgactgccagttcgaaggcatcggcggtgaattccagctgctcaatatccatgcccttctcacaaatcttagaaaatggcactgacactgcagatgtgtacatacgagattccacaggcaacagcgacagcgggaaagatgcatgctggctgttaagttctgcaatgtccccggttatgaaggcgatgaaccggagaaagtcccgctgaactcgtttcaatgttaaaaacggaatgggagtatgtgacctaggttctgttcgatacgtcggtgatgcaacatcgctatcacttctggcctctgacagattgaaaaattcgagattcgagcaccctcggtatatcggtccggacaattctaggaaatgtcgcaccttttgcgtatcccacgctttgagatatgactggatgctctctgcatctctaacaacgtggataacaggatgcgtctgcgcatattccctaagaagtcgttggccattgcgttccatcgacccggccccgcacgcaatcacacacccatcctggttgtctgctagcatcgactcaaagacccgggcctcttgtagtcggtaaacagatccatcattttccttcttaaactcagcacgggaacatcccacagtctgatgaaaatagcggtctgcatcaatcaatcgtcgaccggatgtcgccgcgagaatgaccgccagacttgactttcccgtgccacggattccgatcaacacgacagatgccttcggactgaaggtccgtggggtctgaagatggccctgttcaaacagtattggagatccgcggttggagttcaattctttgagcgacggtggatgcgaatatccggatgcttgtgtgcgttcactcgatggacgtgaaggtggttgagatgaggggagaatagtgtgagggggcacgacgcctgggctatactttcgaggcccatcatctaaagtctcgacttcgtggagctttcgtttcggtgggcgtaccaacatggacatggcgcatagagtgttccacgtgcggcaatgaaatcaggagcaggctagttgaggacccattaccacagagggaaaggtgggggccacggtagggtattgagatatgtgtatagaggatccggagatgtggagggaacgaaccaatatggtaagcgggattttccaaggtttgcgggggaaaaggatattcgtgaaaaaggcgtgggtctgggtgcccccgggccatacgctaccgttacataaggcggacgagcactcacccggccatcccatatcagattttgcctgcagtatgattcgtaatataggtattttatacatttgaatacatagagttatacatcgaaaagtccttcatgtctgaattctctactccgtacattgattctcaatgaatataactctttctccatctagctattcactagataagtttccggtttataatgaaaatatagagtactaattgtctaggtaatttgacggtaatgaggcagtaatgaaaagctggcggtgagtcaggcggtcaatatctactagtataggaaaatctgatatggcggttaaagattgccgtaacccggggactttcgattttcctcttccccgcgggggacttgcgctcagatacgaacatgcgaaacaactggggaaatcatcgaaatttctgaagtttggtctgaattgcgcccctagcttacccaaaaaatcagcttcaaattcatagcttaaagctcagtctgcacgcgattaccttttgcgagacagtgactggctcaccggtagccgggtatcgacccttccccggaagaaccttgttagcaagcgtcttgttttgtgctgcacctaacctcaacatcgcgcttcccccaacagccctgatatatttccagtgcagctcattttcatggcgtaatcgcctgatcgtccgtgcaggcgcctgtcggcaaaggattcgtcacatatcacttggggggaacatgcacccgaatcctccaagtggatcgcaaaatcaactaccatgagcgccgaacagcggcaagctaccggctctagcagcaagtccaaacgacgatggcccgagccagaagatgacgggaaggcgacaggggaaccgaaacgtcagcgtgtttcacgggcttgcgatagctgccggtcgaaaaaggacaaatgcgacggaaaacagccagtttgctcgacttgcgcatcgctctgccgaccgtgtacttataaagccaacccaaagaagcgaggcctgcccactggctacattcgctcgctggagttactttgggggctggtattccaaaggatccaaggcagtgaagatgtcatgcgagctttgatgcgatcaatcaatcttccaagtcacttggccacgatgggcaaggaaacggaggggtccgatgcattgctagcttccttcaaaaacagcacagtactcagagatattgagcgcattcttatagcactagaacagccggaggaggaaagagagcgaaatatccagggatgtggcgatggagagacacctctcgatgtcgacggaattctttcgtccgccgaagcacaggaatggcagatcccagaaggcatggaagctcgcgagacgccattaccagggatatcgccgactcgaaccgcaggaggcatcgctcctacgaaagtcaccggaccacgcccgactacagactgtggtattcagacaagtgcaccagattaccgaccctcgtcctctttcatctcctcgccgaatcctcattaccctcgatcgctctccatgaaaacccctcttcaactcccctataacgcatggccactttttgatgtatatttctcctacacgcagtgttggttccccatactcgaaaagcatgacatacttcgtaccgcttttcaatataccgaaggcgatgtatacgcatcgtgtttaacccccgggtctggggaacacgcggccttatgggctgttctcgctctcgcctcgctccaggatgcttctatctcagcttccggtgaagctgaagagcaccctactgatcatatgactccatcacgaatgtataagactgcccggcaattgattccgcctgaaagtggccctcacgaaatcggacatgtgcaagcactgttgatcctgggtctggtcaagtttggacagcaagaatggactgggtcatggatgcttgtcggtcaggctgttcggattgcgcatatactaggtcttgatcaaccttcgttttctccatcatcgaggactccggatcaagaaaaacagcttggtcgagcaaaacatgtgtttttgggttgctttgttctcgagactctcattgcggaatcaatttcacaaagcccatcgctgcgaaaggcagacctagccagggtaggcgctatcaatgaagatggtcttgaggaatggcatccttgggaggatcaaactgggttacggcccacccaatcatcacgggcatctatgcagcgtggtccccttcacgcgttgagtactttcaaccgcctcgtcggcctcgtatccattttgaatgatctatgctgttgcaagcacgacccaacgatatctcgatcacagctggagcaactggagttgcaattacagcgatgggtaacagaattaccaaagagttatcgtgtcgatctacaaagtcgccctgtgagactggcttctccacatatttttgggttagagatgacatatgaaagtgttgtcattgctctcagctctcaaattgccattcgtgaatatgatcagaacatacccgaaccccctcacaaaattcgtgctacggaaagctcgaaaaaacttttgcaattgcttcaggcatatgtggagacatatagcttttcagccacagcaccaacctttggtttgatgcttcgatttggccttccacggtccatctctagggatctcccatcagttcttgacatggggttacgaaccaacatatacaatctctcttcgcagctttctgtattgtggactatgccagaccagcaaaccgctagtcaaggtatatcacaaagatctcaacacctaggtacttctcctgcggtctcacagcatattggtgcctctaccggcggagatttagaaatcccgttatcgctctcaatggccacaccttcacatcatcttcgtgcaacacatgcgtctcaaaataatgctcatgccgcggctgcccctgagaacccattcctccccacgccttggctcagagccacacaacacatcgaagatgtatctctcctccgcacaccgtcctctctaacctccgtcgggggcgcctctgaacttcccccacaacagagccacttggatgattctcttaacattgggctttctcatcctacatcagcgcctagccaatcccacagtaccgggatgctcgccgagatttcgccatcgtatcaccagaccgcacactaccacccaacggcatatcacgactcatccgtcaatatgagcacatttgttgatatggatggctatgcgcgtccacggaggcagcggattgctcctgatctcgatgcattatttgacgagctggcgtcattagatggtgcagaaaagtatgcatttatcccctatttctttggcataatcactgactttaaccctctgtagagccgacaatcaaccagagttcatgcagaacctaggttttgtttctaatgcgggcattcctgagctctactcgttctccagtcagatcgagcctttcttactggcagagacccagcagctacccaacaatggcaatacctctagtatacgacaagaagcgcagcttcttaatatgtcgggaacccccaagcgatgacgtgatgtggaatcactccattctaatgatctggatgccgtgggaacaccctgtcgccgctggtcggcctcgttggcctctgagtctgctattcatatgggactctggactagagctatacatctagttgttggctcgcatattatatcacacattcgaagcctcaaaggggagtctcaatttgtgtctgtgtgtgttgtgtaatgcgcggcgcatctctacaatatacaaagctattccaggctaggcaactggtaataaaagatatcctctatgacacatatgaaatcactagtctacaaattcatttctcggaaggatgagcgcctttacaagaggacttctacatgaatccataaaagtttcccacaaaaaaaaaagagtatatacagtcacatatcccaactcaatcatagcgcagccttagcctccttttccttctcctcgaaattagcacaaacatgctcaactgcaaccttatacccgtataccccaagaccaacaataatgcccgcagccttatcactgaagtacgaatgatgtctccagggctcgcgcgcatggacattgctcacatggagctcaataaaagggatactgacaccgagcaaggcatcgcggatcgcaacggaggtatgcgtgtatgcgcctgggttgatgatgataccgtcgaccttgccacgcgccgcctgaatgcggtccacgatagcgccttcgtggttcgactggaagctttcgagaacagcaccatggctggcggcgacctcgcgactgtttgactctatgtcggagagcgttgtgtgtccgtaaatgtgtggctcgcgtgtacccaggaggttcaggttagggccgttgattaggaggatggatttacccattttgagtggtttgatatccgaattgagggattcgatggtatttgggggattgtgaaattgagagactggatatttcaagggttataagattgaaggtaagcaggttatcggatatattcatgttatactcgtctctccgcattttgcccggcccggcagagcgctttgccgtggatgattttttggggtcaactaaatctttcaaatgtctaaaattaatacagaacttttactaggactattagggtaaaattcaattaattctttatctgactagagggaacctggaagtcgctgagagaacagcagtagaggggacaacaaaccggagattgagagaaggcatgataccggtttgtataacttatgtttgcttccacatgtttaagagggagatgcacgatgggtagtatggcatagcaaacaagacgagagcaacctataacaccacctaccaagtaggccagctagcaagcatgggactaaaaaacatcctttaattcagttcttgtgcgccgtcgagtctccctaacatgacaaaccagggcaacatgatggtccgagttcccttactagttacaataactaggaaattgtaattattatttacactatcataggctgagaccgagctcatcttcaagacacgtatggagtgagaaacttcgtgctcacagcatccggaagactatatgtaggcacaactttcaagaccagtgaactgcctttgacgtaattttattcaaaaaataggaaaacctagggaaagacagaaattacggtaaaaaagaaactatattaacctggaaacaccccagctatgacgttgttgaaagacaacacacaagaccacgagggaaaatggtcaccacaatgcaaaaaaagagaaaccaccatctatatcaacagttaccaagacttttgctccgatcctgtactgcaatcggaagttgagtgttcctcttttatctatctctctattttctcttgggttggacctcttggcccaacctcgtctgtggtcgtccaggaccacaactttgattatttttcatcggttagattcggtttcgacgtaggctgactccggggatattgttgaatttctggagtgccatgttgagtgtttcttgcaattgcaagaatgaggtaaaggggtaggtgggattgtgtcaggatcatgaaaaaatcatggcgctgacagtgttcgggaatgaagcgccgaaaaatgccgtttcatgaggggattggaatccaaacggggggactgcgaatggctttacgcctccgacgcccagcgggactcgcgcagcggcatctcctcgccagcttgcttgcggcttccgtctacctcgcgcttccacgcgtagtactcgccgagacgggtctcagcgtagctggcgtaatcgaaatcgatttgggagatttgcgcttggatgagtgcccaaacacccctaggagatatgattagcatgatatcaccattatgctgatctttcaattttgttcgctgaactcaccagtaaagaccgggaatgccacggaagcggtcaacatcctcgtacagccggtcgacaatctcagcctgggacgaagcgtcaagaccgcgttgttcacagtagctcttcgtgtactcagtaaggaactgacggcgcacagactttgtcggcatcatgttgtaatcgcagtcgtagccaccccactcagcaaggtggttcgatatatcgaaggccgcgggtgcaggaaccgcatattcataatcgatgaaattgacaggcgcgacaccgtcttcgggggttgggacaccgttctcgcttggaaggacaatgacgttggcgcagaggagatcgcagtgcgagaagacgagctataaacccagcgattagccatttattcaacaaagcaatccccgttaccagcaaattcaggctaggagccacataccccatcttcaccaatccccttcccgtcgtccagcatatccaaaacccactgcagctcggcttgcaggctcaaccggcgagcacgctgctcgggtgtggtcactggcaaagccagcacccacttttgcagcacagcccacatagatgggcccgcgcgtcggggcttgattacagtgatctcatcgtcctgggagttcgcaatctcagccacgggagcgtccttgtcaggcacggctgcgctactaggaaggacggcgtgccactgcgccaagcggcgagcgacaccgcgccagatgggcggggaaactagatcttggtggttgcagggtctgccgcgaatgaagcggtagagcaggccgtttttgaatcgagcgaggaggggcggggccaggccacggttggccaagagtgcgtgggacttggtttctcctaagaataattgatctacttcagcatatgtcgcaatgggcaagagaggcgcggaggggctttgttttgttggagaagtgggaatcttgacgaagattgtccgtcggggggattttgctcgtactttcgcgatctatgaggatctctgtgccatttccgtacgccctcatcagtactgcctcattgtctatttgttcctccgtcaggccgggtttcaggttgataattttcaagagctaggggctgttagtctcggtttaattccgaaaagcttattgctggtctcatgggaagcaatactgggaaagagggacacacggtgttggtgatgccgtcggtgaaccgcacgaactcaatgttgttgtcaggaccctcccagtcggggttgagggtcagaattagcctgagagcagatgcctgggagtcctcatgactgtatgataggggaatgtatcggaattctggcaagggcgcctgagtgtatgtcgagcccatgttggggttgggtggagcggaggtagaaaaggggtattggcgcaagtcggtttgtgtgccaggaagattttgtgctatttgattagttcacaactgcttgacaggcacccctatatcagtgacgaggtcctcgaattcaagatttaggtaattgcacgaggccaggctgctagcgcagggtgcgaatggcgataaattctagaacgaagtaaagcacaatgtggaaaggcggattctgtattatggcgaaggtacaaaagattcaggggcgaagaatttgaagacgctatcgatggcggggaggtcaatgaaacaacgaggggaggtctcgtgctcccgacccgtgattggaagatgggacgattttctggggcctagggtacattcttgagggcaaaagggacttgtccgccgccactataactggtagtatatggatgtaataagttgtggttctttgaagatataagcctattggatacctataaaatgatttcttcatctcatgctatttgtttcaaccgcaattgcatggcgaagtcgtactaaaacatcttgattgcgcgaagtatgtacgatgtacattgctttcggcaggtccaagtcacggggcaatcacatgaaagacagccttgaagacaaaaagagggtctatggtcacatgcacgggccaagccctgagcttagccctacttacctaatccaacaaaatccctcaacaaaaaaagcgaaattagtcataaaatccagtattagtcaacgaaatggaaaaacccttccaccgaagcccaatccgctctagcgtatattgacttccagacacataaataggacctcctcgcccgcccctttactctttttttcttttctctccatcatcagtagaggtttacataacttaatgtaaatttcaacggggctccacaatgtggcttgctgagggttatcctatggtttcggccatcatgggttttcttccgttcccggccctggagagtaaaggcgtctctctttttcccaatcactttatggctatgctagggtatccttcgggaagccccatgggtgctagctgtggagagggcgtcacataccattttttcagtcactttgatgtgttctggaggttttgcttgctctgatcttcgaatttgatcagaggttgcagcgagcgtagtagcgttggatactgcgattttcagctggctcggtacacggtttaaatgttgtaaaaattatctacaactcatcctacaaagagcatcagaaacttccctaggctttatgatctcttgcgatgctgtatctcgccaagacgagaccataatgttctggtctttcttgccaagagatatcgttgatgtcggcatgccgaggccttaaggtatatgacccaaactaagtcactatatgtactactcttcaccgctgaagccgaaatcttcattgtcatcaccgtcataacttttagaattttctatcgtgtattttttcacatgtcaccaatcatgcatgcccagcattgccaatctgaatgcgctgtccggtccatttgtcgtcactgcgcaacaccggccagctagtgccatcggccttgatcaggctcaaatctagcttagtgcccagtacgcggaaagttgacttctccgggtcaattggcgcaaagagagtatatgtatcctggtagcgcttgttgtccgtggtgggaaggtcgaaactaatcgagttggtagcaaactcaaccttggcccgttgcttgtcaatcttcttgagatagagggagacgttcacggcggtgggagtctggtagaaatcgttcctgtaaaatgcgaaagtttgtcagtttgctgttttcaaaccagaatagcagagctagtctgcccgtatacgcacctgactgtgtccactttctcctcgcccgggggcttggccttgccaacaaacatgtgcctcgtcttctctgtgcagccggggatcttcagaaactcgtcgaactcgagcacccggcgtttgcagcaggaccaccccttgctgccctcgtggaagaccggctggcccgggtggtggacgcacttctcctcatcacgagcagtcgacccagtataggacgcaccacaacccctccgacggcatgttgcgttggcggggacctccgcatcaggatcatcagactcgggctcctcgatgactggcttctcgggcggtgccgcagtagcgatagttggggtagcggagattggtagtcgctcggacttcttctgctccgccggtgtaggagcaatgacttcctcggccttggagggttcaggcacaggtgtgtcatcgacggtggaatgcttgccggtagtgcatggcgggatagagaggaattcctcaaaggtcaagacgcggggcttgcagcatttccagcctgagaagttagcggtgtcgcggggtagaaatgtagcagaagccagcggcaagatcaggtatcacattgcgctgccacaatggcccaccatgaaccgttggtggacttatgggatacagatctggcatagcttgaacaccaaggtacttacctttctgcccttcgtggaacactgggggacccggatgatacacgcagtcttcttccgggtcggtgaaggcctttccgcacgctttgtggacgcacttgcctgccatgatgtgtagcaagacaaattataaggaaattgacgggactgagtcgagagaagagattggaaagtgttctggagagttggaatggcgcaggttgcctaacagggtttagcggggaagctcgaatgttccatcgcggagaactctctgaccgcgttcgcatcacggcaccaccggccatctcgaaacaccgtggttgaattcatttcttgcataatcgagattttctctccatgtttcctacgcatttacttctcagttcagcccgcttgacgctgtttacacgtgcgggctgcggcctatgcgataccgccaaaaataccgtgcttcagctccagaaacggcgcccctttgaatacgtcgaagcggacatcatggagcccgggaataaatcttggaaggatgtttacgagtttgatgttccagtcctccacgtccagtcagttcacaatggcttgcccaaggaggccaatctctccgacgcgcgcaaattgttccatcgatggacagagcaagaagtcgaacgatcggtagatgaagccgagaagacacagtcttgatgattttacttggtgatttgtccaactgtaccgatttgccatgatccaccggcgggaactgcgcataccggggcatcgacatcgtgatatctcacccgcaatgcacgtcgcgcttgttgtattatatctgtctactcgcttctccagtcctgctggccagacctatcttgccacgcacatcccataagggggtgtatttctgtatgtattcgatctatctttgaccgtcaggtggatgatgacagatctacctaaataccctatcattgtacaatatactccgtatgtagtccctatttaaccaggatgtcttgattgtcaaataatacttgctctataattacaattgggtttcccacacaaatgcctcaatactccgaactcgtggcatacctatctagtatgtcacagctcagtcattttatctcgtctcaaactacccaagtggactgataattattatatgcacacgtttacaatttccttttgtacatatacgtagatagggctattatcgagggcatccaaggtcaagtataagtagtacatatagtacggagtaaatcgatatggctaggcggtaaggaaatagccacccttggttaactaactcctaatgtactcagtacggagtagagtagccctttccagatatcatcgtcactatgcaagaagatgcggcatatcattcagggtctctgatttgatgcggtgaggttggactgaatcttggactcttgtttcaccttcaatttctcgtcgaaatccgagtttcacaacaatctgacattgtgaccctcacggttctgccacgcgactctacgcgttcccatcatttattcctcggcaaatcattccagaacaagatatttttgaattccgtagtaagcggttctcaaatccgatctgtggtgctggcgtaacatctctcgcgcgcacagtgcaaataattgttctcgcttcactgtgacgcatgtacttcgcgaaccaaccaacaaccatcatcttcatcatattcagttccacttgatcggttgaaaaagttcagttattgatattggtgagtgtttttcttgaataaaaggctctttgtttgtggctttatgaggactacagtcaactcagaactatgatcccaactccgagaaacgcagactaatactctcacattcatcaatctaattctttactcatttgattaggtagctgaagccgataatgcctgatcaaacgccaatggcgaatggcgccgacatttcgcggccaccatcggcttcatcatcaaggacttcttctgtacagtcaatccaccctctaagatttaattgtacgagatgtaaggcaaaacacaggcgctgtgaccgaaatagaccaggtaagtaccccttgacttgatagggcaacacaattgcaggtgcattgatgactgactatttgcatagtctgcaacacctgtcggaccttgggccttgaagctgaatgcttatatccttctgcggccttagcggggtatgtctgtccgtgatatcagcttggccgagtcaaaatgactaacttatatcatctagtgccgagaacataatcaccaagaaaactggtactccattctcagggccaatgttcaataatgattatgctttacctgctttacccacaacaggtgacaaaagaccaagagctgcagacagttcttctggacgaattgaacctgtcaatgacgtggttggattacccatccaaaattctttcagccacacccggcagacgcagatactccagcagcctgctgcaaagcggtacaagatatccgaacttagccctgcaactggaaaagccacaagcacacctgcatttgaacgaggtcaaattgcaccatttggcatactcagtgggagcacactggatcctccaccgcgtatgcgtagtatatctcctactctgcctcaagacgaaatggagctcaggtgcaacttgaccaccgaaatcaatgtccagagaatgaaggaacaccgtcttacagcagggcatttgcgtaacatcatcaagctactcacgaaagccaagaccgaacgcccaaccactgaacccacgattgccggatcgagtgctatactgtttgacgagtatcgtgaggaagatgatctcatgaggtttgcaataatcaagctgaaaaggggtggccaatgctctcgtgctcttctcagtcgatttgagaatttcgtatatggcccattgatgagtcccgaggagaagaagatgcaagagcgtgtcatatgcgttgaagagtgcctgtcaactaactcggcgtcactgacagtcgatcataccgacctgttcctcctccgccttaaaagaatcatacttcatcctgatgtctatggcttagacgagaatgacccacgcatcgccttcctgcgagacgagctccttacagccatggcgactgactcgaagctgagtcgtccaatccgtaggaaattcgcggaacttttagacccagatggagagattgccggtatcagcgtagacaatccaggcatcgaaaaagaaagcccagagtcgaggaaggtgctacccaagcctacttcttcacgcgtgccttcctcgcacgcgccagaaacaccatcgagaacaataacaacaagcaaacaaaactctgtcactgctctgtctccttcaccgagccatccctctcttttccccccactctctctttcaacaacccatcctccccctgtctcctctcctatttcatctttatccccaccacctctggaaacgattgatttgaccaatgataccatgtcgtcgtcatttcccttcatcgtgaagcgtacgcctaagaagcgtattgactctggcagccagtcgtcgcaatccaacagcactgcagcgtcgcctttcgtagagccagcttccaagaaacgtcctgcttctggcgcgcagtcgtcggacctcgacaatgttatcgctccgtctcagaggcgttctgctcctagcagccagttgttcaactccgacttcccaaaaaggctctggagtatcttccttgggaaacaggcttttttcttgccaattcttgatctcgaccaactgaaaatcgcttttaacctggccgtaaaccgtgggaaaattgaccccacagtcattgacccaactctcgggctttgtattgcaattgcctgccacctggctccttatcagaaccttggggaagcccgcaagtggttcgatgcagctttatctaacatggctgacccaatcaaatctcgaccttcacttcaatctttccaccaccaaattctccaggttcactatctccatatggtcgggcacttgcgaatggcttgggacatcttatctatgtctataggcagagcgcaatctcttcggatgcaaactatgcatggtggatgtctcgccgtggacgaaaagtcgttggagcaggttcggctggtatggcagtgtctctggacgaagaaactattcctcactctccagtttggcgtggtcgatcaatccctcgacagcttttacgacccacccatgccgatgcagtcgcatattactgacaacatgggagtatctggcaagcaaaccatcgaacaatcctatacgacgtcttcttttttcattgcttctgcttcccttattaagtgcactgacgatttgatcaccgttgaaaatgatctacgtgtgactcgcatggaatgtccgatcaaatggctttctattgtagacctacgtggcttccaaggactgaatgagagactctcgagctggaagaacggtctgcccaactgcctggaatggagaggccctgacatcgaatgtgctatgcagaaagaccttcttattcgccgcatgtccctcctggctcatgtgcgatttgtctatttccgacttcgtcaataccggccgttcttcattttgagccttcgactttcccaaacgtgcgcctgtgaaacgagccctcatatcactggcaaggatatcgattcggtggatgcgtctcctgtgctcggcctagtgtattacagtgctgtcaaatgtttgagtgctgcccaagacattgtgaaaactttatctgtatccttcaccaccacagcagatgagtatgctaagtgtgagcagcttgaatatctctacgctgctgccctcattttgattgctgcccggacagttccgcttgtcttgaacggtaccccgcggggtatatctgctgtatctgctgctgccaccacggcgaagtccttcacagcgatgaccgaggagctaaaggaaattgacgtcttgttgcgcaactaccaagagagttgtagacaagccccaaaactcgaacagagaatcgcacgttcgcgtgatgttctcgaccagatcaaactacagtcagagtcatctaatggcatagtcactgacagcgacatcaggcttgagccagttatctggaaccggatctatgatagactcggcctcaatgttccattccagcgattctcagaacctcattgccccgctggctctgcgatttcaggccgtagaaaaacactcgcttggctggaaagtctcccagtggatatagaccttgaaaattagggtcctttctgtcgttgatacagctgcgctgaagcgctggcaatttcactgttctgtagggaggaatttacccgtggatcctttcatttttagctttgaaaaatgaaatccctttctaaatggttctttcgatatgtagatatgtggtatctggttagtggttgcgcttgatcgtggcagtctaagttgtaatggtcaaggcttcgctagagttgaataggagatccaagaggtacaggactggctagggacatggtgcgtggccttatatagcaaaccagcggaaaataataatgatcctacgtggggggattgaaccctggctggttatggactgatgtgtcccaattaggaaagggtgctatataggtcacattaaagatgtactgttacttccaaacccaccccgattagctcagtagatgggggctctgaagttctcgcttgggatgctgagagtgtatatcttcaattggtttcggacttcatgaccccggggcacagttaagatcaggctgcacctcctaaggctgaacgagagaggatggaatgtgtcgccacacctgcagggtaattgaccggggccgaagtccgaagggggtgtgcggtcccaacggatggaagttcgtgggtttggaagccctcttttctttttctatattgacattacttttcaacgactcacctagtgttttgtcctataacttctcgcttgcaaccagccacacggtacacaccctcgttgctgtgttctactcgagcctccaattatccgttgcatgctgtcacatctgacttgtaaatcgccacggaagaatgagaagagaccttgaggtcccgagacggtcgccaacttattcaccgaggattgactccctcattcctgtatatttctcgttcgacatctcattactccccccgccaggcaatttgggccatcacagcatttccccttcgctcagaatgtgttctccatacaccaaccaggctaacaacttcgttcctcgcatggcacagaatggtcatttgaaatcaagtacaagctattcatcaccatctatcgcagataccctccgctgtggacctatacctgaggagcggtggtgtcatcgacgttcagctaagaaagtcagtctacaggggaaggccattggtatggacggcgaaggtgagactcttacttctatcaatgacttaagatacccggctaagacaaatgacacagagcatgctgaactcgttcacggaaatacagagaaagcgggtgcttgcaacgtatctttcaccgaagtctcgatcacgtttatccctctaccagactctagcaccgactgcacaatcagcaactgcgtgttaaaccctgttcctacacctgacaagcaatcttatgttcagctagatatcccgcttgctgagacccggatgtcgtgttgctatcagtgatatactggctcgaaaggaactcatccaagaggtggtcaacagtctctgccacgcatactttgagatatactgtcaagacttcaagtagtacttgattatacaccctgcatccctccggcggactgtttccttgtgtaaaatcacgctacattcgaaagtacatggaatccaattccatgcctttgatatttcattggaccaccaattgacaagcgcaagagcacggagttgggtttcctattgattggtgagttttcaagctactagccaatgagcccgtgatcttaaaatcgatagaatctgaaggctgtgcatgatattttcatctgtaggcatactgccgatactatattggattcactgtcgtcaatgctcctaggaggtgcgctatctctccaaacaatcattgatagtatatattaatcattccaactaactcgtctagctatcaatttgacagcatataccaatcctaatagcacaggaacctcgatcagaggcccaacagtcgcagcaagagcctggttactatccgcaccaaacatcgccactgcaacagcaatggccaattcaaaattgttgctagcagctgtgaagctctgcacagtcgccagcctgtatccgaatcccaatttatatgcaacaaggagggtcacaaagaagattatcaggaaataaacgataagtggtgctgcaactcggaccacggatacaatttggtggaccacatggcggccttgcgaggcgaataagacaaggatggtgaatagcaggccgatgagagaccagggactgatccatttgaggaaggtttcatcgtaccatttggcagaaattcgtcggagcacgaaccgcgtgacgattgcggcccctagaggtattccgagaaacaccgcaacacttttagcagccgttgaatattcgaatgtgactggatcgccactgatgacgctgatgaagaacacccccattggagcgaaaagaaccatttgcagcactgagttgagagcgacgaggatggcacaatattcgctatcgcctccggctagacctgtccaaactagtacctggaagaagctagcggttagcattgtctcgtttccaagagccgtttgagtggtgtcgacttgccatagcaatgcatcgtgccaatccaacaatgatcagcccctgtcgcaattctggctcgtcgggcaaaaaagcccaagccaaggccaactagtggaaccaagtcagtgagaaactccgtgtcatggaagtgttgggatcacggaccataagaaaaggggcaataatccagttcagaaaaatactgaaggcgatctggatccaaatatctttcgctcgcaaaacatgatgcagggattcaaaccgaatcttgcacaagatagggtacatcatgaccagaagacccacagctagaaatacatattcagttagcgaaaactacaaaatcattgctggtttcttgtgcgtaccaatggggacagagactcccacaaatttccccctttgtagggcaggtcctgtgcttgggacaaagttgcccaggatgattccaattgccatggcaagaaaaatccatattgccaagaatcggtcaaggataccgagacttgagaacatggattctttcttctgtggctcatctggagaagaggtctcccgttgcttttcaatgtcgcatgtctttatttggtcgttgggaggactggacgtacatgtctgtggtcgtattgatgtcatggcgagtgaccaagtttgttcggttaatggttgatagaagatatagtggtcggatttgaagatgtagcatggaatttttgtattcgtctagatgtgtccatgaatatttatatttgtataggtctagatggtagtggtatgtcactgacgggcgctgattggctgaagtgccaagccgaggccaaccaatcagactttggtagtgacattcctcataggcggcggggtatccggggtattctggctgcagagccaaccgcctgagtgtcaaatctctcaaacctcaagctcggaatttatcttgacataatgtcagccgagcttccatggcatgctgcatatcccgcaccaaggggcgcggcaccctccatatcacgagaagagctattgcaatggatccgagagggtaaacaagcaggcaaagactttgtacttgttgacttgcgtcgcacggactatgaggtacgaactgttcgaaaaaagcgacatcttcatgcgctgatttatcaaaagggagggacgatccaagggtctttgaacttgccagctcagagtttataccccacgatcccaacattatattctcttgtgtcgaacagcagcgtgaaatatgtgatttggtattgtggtgagctttacttgatacatatgatagcgatatcttgaaacgcgaatactgatctgcattcagggtcatctgggggtcgaggtactcgtgcagccggctggtttgcggattaccttgaagatcaacacgataaagagatcaagagcttggttctcacggggggcatcaagggatgggctgcggctggtccggagtatacatccttgatgaatgggtatgatgcctctgtttggacaaagtagaagcactcattaaatgacatgatgtttgtcaagtttccatcttataaggggtctcgtaacttgaagagccgttttaccaagaagatttcttcggatattagttatgtgctcgaccacatcgtccgattaggtaaacttcttcggtgttatctcttcggcgggtgtggtcggtgggatgtgatatacatgcctcgtctcgaagtagatatacatgtatggtagccgttggttgagacatggtcccacgatccaattggatttagcattgtgcataatgtgcaagtcaccttacaatgcaaggtgtgttaaagagagtataattaaacttggattaacctagcgaggcccgccatatccaaacagtctcagaaagatcctcaatacaaatttccccgggcagtattcttttatgcagattctcaagctaaatgggtatatttggagctattgacgcccaggcacacatttactcatttctccaaccccctccaccagtgcgctctgtgaagttgctcttcaatatgtcagtaacattaccgaggcaagacataatgaataccaagggtacgcggactagatacctgtgttcaaccttattcaattattggcgagatgagggtgcgaatgtgtttcagagaggttcttatcaagggatgcacgtcgcgtttcttgttcttcggttgtaggctcaaccggacttggagcagcgacctcgctcaaagcgccatattcatctctatcatcatccccagtatctgtctgtggcttgctttctggtttggaacctgaatctttcttacggccacaggtgaatattcgctggagtttggaaagcgtcatattatccaataaatgagatcaaggcgaaagatgctgtacaatgtaagaggagggtttccaatagaccggcaaccaagacccaggagactataaatgattggccactttgctacgtcatgactatgaaggggtgggcagattatcggatacgtttccgagttggcccgagtgttaattgggctgaaattgtgtcgatgatcttcagattcgaaatgaggaggttcatcgtgtagtccgtatgtcgttgcgattatctcggacctaacgtgccgttgttcctaactccgaccttggcattcttgtctcaaccttccgccttgtgacttcactccctcaactatagttactttcgaagatgactctccaaattgatcaaccgcctcttgagcaaataagttcagaagattcgatggacatgttggatcctctggctcgaagacgactacaaaatcgcctcaatcaacgtgcgagcagtaagtggcacttttatttgccacccggcattaactgtgcagactaacaccatacacaggaaaaaggaaggcgttagagtataaagagaaaagcaatacggcagaaaggaaatgggttctctatatcgatgattcgaacatctcaaaaaagaatgcatccacagaagaaggaacaagctatcaagttactcaatcatcgccacctcgccaaaccgaagtctctttttgttccctgagccctgcccagcatgctgcgcttatgaacaaattccgtgcaaaagctttgcatatgattgagaacccgaccctcctgcgaaatcccacctttagcatcacccagtacaatatacttcgagctatgttcatcaacgccgatctcatgggcctcacattagagcttctgaatgaagacctcgcgtcgcagttcaatctcaccggtccattaatgtcagcgctacatctcccagcaagcttgtgcccatctcagaaacaaaagaaaatcatccaccacccctggatcgacttgattccaatggtatctctacgggaggccattttgactagggcggatgtaattgacgaagatgaactgtgcggcgatttttacggatcttctccttcccaagaagtcgggcttcgtgtttggggcgaagcttgggatccatctgcttatgagatctcggagacattgatcaggaaattcagttggatggtaaaggactgtcccgatatcatcaaatcttctaatcactggaggaaacagcgaggggaaaagcccatcaggttcaagatcaaatgatatttcaatgcatttataataaacacatcaaattcctttcaaatgtctattccttacagcgaaaacttctcctgggtcagtttttcgctgagttcccacaatttagtccaattgccttcgtcgctgaggtgcgcgtgcaattcgtcgtctgcgactgcgttccggttgatgtatgatccattgtagcctgggggcaggattagtcgaagacactataaaacgggttatgggaggtgttctgcttacctgcgatggtagggtcgagcattcctgtgatgaggccagcggctccctctgaggcagtggaccatgggggcacttcgaaaggctttccttcgatgtcgaccagggctaagagatcgtttagtgaggagcagaaaacattcaacaatagggcaatccatacatccagcctttttccattcttcgacctggtccaaaaagtcaggagggcagtgtcgttgcagaccggttagaacagctaaatgatggtcagctagatccacctaaatagtaagaaggagaaataagacataccaccagggtcaatactaaaaacgcggatcttctcgcccttcaacttctggcctagtcttttggcaaacatgactctcgcggcgttcgactgggcatacgcgaccgtagggtcatatgtccgaccatcctacaaggaaacggaatgtcaacgtggttgaatataacgggtaagtaaaacttacactaaagttgtagtcatcgaagttcatcttcccttgtttagccatgcccgaggtcatgataatcacagacgaatcgggccccgcagcacggatcttcggtaggagcaatttgacgagcaggaagttcgctagatagttgactccaaattggctctcaaatccatcctttgtcttggtgtaaggcgggaacattactccagccacgcatacaaggtgatcgatgtgaggcacatctgctaggtctccgacggcgtttcgcacggcggtcaagtcactcaggtccaggttgaggaagcgagtctccacgttcggcttggatgacttgattttctctctgatgcctgccacctttgattcagcacgggcactcaggatgagtagttttgggtcggcggtggaaagctggagcgcaagttctcctgcgatggagttgtcggaaacgccggtgatgagcactgtgatgaagcagcctctgtcagcgcttttttcttttttagatgaggggaatatttgattacctgtctttccggcaagtgccttgccatacttctcgaggacaacctcagagcggaggatttgctgcttgttggtcattttggatgaaggtgtttggaaataatgaactaagcaatggagaaagcaaagaagtcttgattgatatatcctccacttgactagacacaacagtccactttataccttttctttcggcgataatgggattaagtgtttttgaaaggcatcgctagtatagttcagatggaccaatcatgacccggggaaattcccactagaggtcatcccttgccgtatcgggttagcccaatgtcatcaagtatcagattgtttcttcaataattattcctaagcaattagaagatgatagaacgtaatggggatatactaaggacttaagatgaaatatccgttaactcctactacagtcttggctctatgcaggcgagattacatgttagaacatgttgaagtaggatattatgatacaattgcactttgataatcacaaaatagagtacagtaaactaactatagctgcacaatgtattccttttgagaacgagggaaccgaaatatgtctaaaccaagagaacataatcgatcaaacggataaagccacctatggtgcacatgtacgatctcccctcattgtacgacttgtagaaggattgccaatttagtcatgctattgaacaattagggagcaccaactcatattaaggaccacttaggggcaatagtcatagattgggctaagtacaagggtgaaatcactctgttgaacttccgttccttgccttctatcggcaatgactcggggctcaaacggagatgggttgcattgtagaaaacgccagtggcaatgattttagaaagaaacacaggctattgatctcatcgttgggtttttgggtgtaaatgggcaaattagaatgatatccttggaaaactcctcgcgaaaccatggaaagagccagagtggttgaacaatccgcgacagccgaaagatcggtgcgtggttcctgcaagacccgaagagcccttgctaataagaataagtatgtccttagcagagaaagatccccatttggcaatgagtatatcataacagactcccgtgacttgactagatagcccgatgcaacaacggacctgttgacggaagactagagacatagatttgggccaagacgagaaatggtaaatgtgattattagattcaaacaggaggctaatccagagccaccggcccgattgtctacacgtattcaatacaatgcgccaaaccaaataaaacaagaaaaggtcatcacacatatcagcgggcaggcatgaagtagcagtgccccaaaacagcctgctctagaaccacatgatgcctgcaacgagaccgatcacaacggccatacagcttccatggagctcatgtgagtgccgaccagcggcagcatcggtggaatcctcagcgccaactttttgttggggcggtgcttgctcagatgcggtgattaggtcttgatttgaggcggcagcgttgggaattgtggattcgggtattaataatttagaagcgccgttgatctgctccgcggggaatatcgatttcgcataatttgctccgtggagtccgacgcgctttccaaaatcaatggcgacatgacaggcctgctggaacatgtcgcggaatgaggcaggagatggcaacaatggcgtctgtatgctgtcggaggaattattatatgacaagatgtttggaagagattcgatgtcggatgcggttggtagggattcattgatggtgatggtagaatccggatgcgtcaagcccgtaactaggctgcggttggaaaatgaggcgaggaatgggtagtcgtctaattgctggatgaagtaggttctgaatgcgcgggctctgcgactgaatgaaaatgaggattcgcgggttgacgatgcaagtcgacttttatttgcgacagcggtcgtttcgctgggcgggaccacagcggcatttccaacccgcgcagtaacgggtgggcgattacctcgcgatcgatgtgacgcagcaagaacccatgatttgcgaggctcgttgagcggcggtgctttcggtgctaattcggtgacaccatcttgaaggagagggacatctagacagtcgacttggttagttgactcggatgagctgggtggcggaaagggggacatacggcgaactgcgccggtgtagaagctgaagtccgcaaacttcgagtggtagagactcggtagtgacggcaccaatgtgagaagcgaaaacacaatgaggatgaggagtggaagagcaccaggtttatccaagccagaccgcatcgtccctgctccctggctccgtccagaagcttcggagtggtgttttgaggttcagacttcacgggaatcgaggagaagcaagaatgacagtttcaaggccatggaggggacaagctcgggtgtttcgcggtttcaatgcaacgttccgtgagatgcagtgtttctgcagagcaacgcgccgacgcgcagggggggctggtctatctagaaggtggccggggacgagatttaggagcttgaggatagaaaagatgcgaggagggcacagatgcggtgggttcaggtggattcgacggggttaagagtcgaatgaagcacgataaggagccctcggggtaggtggatgcgcttccttggctcttctcttttttttttttcgcacagagccccgagtatgacgtcgatgaccgttttgtagaacaaaaacaacctggacttatttgaaatgtgccgtttgatctggagtgtataaaatccccctctgccgaaaacgtcgaggaatgtttcccacgttggccgcattttgacagtttgagggtttcccttccaacaatgtgggcctgaggcatcaccgtccctagcaacatgtcgatcaccaaagagaaaaacaggattctgcattaaagatcctggttgttcagtagttcatcgactattttatttattattcccgctttagccctcgtgcatagtgtgatgtgcgctaagtctattgctcgtggcaaccggtgagtaccgaatgtcgtgacggagaacttccagtactccaacgaaccatggctcctaaccagcatatatacatcactacctaggtatatgataagtatcggtgagctaacaacttcatatgtagccaaagctgctgaagaagtgggggttatttctggctatacataagtaccccgataggtagttagtcaatagcatagagcgcaaaacatgtcattccatcgtcacgtgaatgaaaatcatcacagcgtagcgcatatttacaggtctcaaaaagaaatgcataatgttatatacacatatgcttggtaaaagcgaaagccaagagaaaaaaataaaagaagcgaaacatgccaaagacaaggacaagaatcggagcatcatctcttctttaatcatgcacattcccgtctccattaaaacggattcatcatagaagcatcaggaccagccggccggctctctcccccacgaactccagaaacaggagtagatttcgtcaccggaactggcgaaacggtagtcggcacactaacatgactaggcgagcgactactgcgactgtgtgagccaccaccgcgggagacactgctcccgggagtgccggtactggaaccaggcttcccgccgcgtttgaccatcttccccagcacagtgacgatctctgcggcgtcttcgaagctttcgtcgtccatgccttcttgggaattgtagacgtccgcgatggcctgttttgcgaggcggcggcacgcaatagggtcttggaggcagtcatatagataggccgcgtattccagcttgacggagagacgcagagggtgcgagcctggtaggagtttgtcggagagggttgctgcgtggttgaagcaggctgttgctgtggctgtgtagtctaatggggggaggaggaaggaggagatgggttggggtggctgaactggttgcagtactggaaggcctggaggacgggatgttggtgttgatgccgcattgattttggacttgtaggggtgggagacgccgagggcggttagggtatctgcgccgtatatggagtcatgtttgaaacgtgttggtatgtcggtgtcgggagtaaaaattgggcgactgtggaataggacgaagatatggtagaaggaagcgcggagtttgtaggcgagcactttcagctccacaaacctgtctaccatggggaggatgtagccctccagtattagtaggccttcacgggagagccatataatacgatggtacagctgaagggatcttgtttcacgtgttgtgtcgagtcgccgcagcttgcgggctctaagaagcttttttgatagcatgacggagactccgaggactttgtatagcattgccgagagcaagggattttcgaggtccatgacggccgcgaaattgcccagggccttctgatccacttcggaggaggccatccataaagcccacgacccggaaattaggaagtctgtatatatcgagtcagccatgttggtcatgagtctcaagcaacaggcgtaaaggttcggggaagaccaattggccgagactcaattgcgaggctagaaacccctcaacagataaatgaataggcaaagacaacgccaacttaccgaaaagcgcgcaaacagaatttcaaataaccaaacgcagcgactgaatcatgctccagccacgcgcgtatccccgagccgcggaccaattgatctacgagatcgatcttggcgtacaaaagtccaaactattccagcgatgcgccggagccacaatacggaatatccgaaaccaaaaacaccaagttccgcgcaagctgcaaggttcagctggaccgagggggcggcgattgttcagaccgcggagtatatcacagccaatggctttagtttctgggagcgggcaccaaatccaattgcgacaaccgagtatataatgtttgaattgtagtaggtagtgcggtccgcgcgatcaaatcaatatttcctgttttgatctagcgacggccgagttttgaatgtcgtattcacgcggtgtggtggctgggaatccggctagcaacgcaaggagcaggcaatgaggtgacggagctcgtggctggattggaagtagaaacgcatcgtgcggcggcaaagtagggggtagagtgggcgaatgcgacgattttcagtgccggcgaagtctgtgcggggaaggaattggggacttgtctcgggtatgaagctactagcccgggggctcgagctagaagtgctggggggttagtgttattattgtagatgttcgggctacctgtagggagtcaagcccgtggattaaaagagaattaggaattgaaagatattcgcagactgcaaaaatgcaaggtcatgctagctgcgtggtttcccctgatatgacgaagagatcgggttggactcgggataggtgtatggagtattgtatagtaatggttactagtctgtcttggagtcccacagtcagaacagaattgtacaaaattgtacagaattcattggcatagatgtgctacgagtggaggtaatggactatttgtataaagcagactcagtagggtgcaattgcagtgcccagtggcaacttctctcactctagtatattaaatgctgtgctgtcctgcactagtctgagtttcgtgatgtcaattgatcctgttaactccctagtaatgccaggtttgctacgtggcagcggctcaaggcgagagacaattagggcagcatcgcagattggctgggcactgcctggctaaataggtgcccaagtcctcgggccagattactttgaatgtacctgggcatggaaaccttagcacggactgccacgctggcagtggctgtgattgtgtgtattggtattattagtgtagttatgatagaaatccacctatctgatgtgatggaagtgagaattgtatgttatagtgttcattgtacaaccttggacatccattgatctacattcactatagaagaataatacatcgttgatatactacagctctgcaacttacgttgtgttctcaaattaccgtatctgagctgttacaccgccagaatgatgcccctgttgatcgcccaattagaccaatccattgtatataactgtacagtatgttgcagacaaattggtaatttaaggtctttttcatttgactgtaatttttacgcctgttttccatatccaacgacagccttgtacatagtagtctccactataagtctgagatgcaagctatgtatcgtgcatgcaagagtaaccaaagaaaaaaatgctaaaacaaaatcgccctattcatctaggtcatcaactgggaatccaacaaatgcgcgcctcaagaaaacccgccagatatcgttcgctggcttcttttgcttgctagccgactcagcgccttggctattggcatcgctggtgtgcttttcttcaactccttcctcggcaattctagctgcgagttggaagaagctgcgtactgtcaggtctttcatttgatacacgtcatcatttgtggtgtactcgatctcgtagtcaagacgatgatcgtggcctcgtttgcctgccgcgatctgttcgtggatttttgttaggtttgagtaatattgagtgtagccaagcatcgtaaacgcctggttcgagtatgccggaccgggaggggcggttggcgatgggggctcggggactttgaaattgggtttctttttcttgtccttgccctttttcttcttcttctgaatttcgggtggtattacagagtcgtttctggtttccggtggatgaactgcagcatgatccagttcaaacgttgtatcgtcaacttcacgtccgaacaaatccacaccatgtgtgacatcgagtcccgtggtgttgtagtcgatcacgcgcagactggggaagaaattcgggaccaaactgggagacactagcgatacgctgtatcgttctgcccacgggcctccaatcttgtccaggaacttctgcttcttcttcttctttttacccttcttgtttgttccaacctccggggagatatctcccagatttgatatggagtcaagctccttgaaaatgtccgacggaggagatggcaatgaggaccattggtttcggagtgactgaaggtagtcggtctttgagctgatcgacagcttcccgttgacatttgaatcaatgtcgaccttgttgctatcctggagcatgaagtggtcgatgttcatatggccgtaaaagctgccgacaacaatgtcacggtactggtgcatccagagcgtgtatttttgccagcatgtttcatcccagttctttttctcgctcgaccgggccggggggacatggcccatgaggatcgctttcatattgcgactgcgcaagattttcaactgcacccgcaaccactccatgtgctcgtatccaggttccgacttggcattgcatccatccactgcgctgttggaatcgaagaagtacatggtgtttaggctgatgaccgctagccgaccggggatcacttccgtggtgaaccaaccgccctcgacgaatgtgtgacgctgatcttctgggataaactggtcccatatctctgcaaatcgctttgtccacttgttcgggcccttgttgaagatgttgtggggcatgatatcgttattaccgaatgtcgggattacagggatcgacattttaggcacgccattcgaagtcccaccaaccccttcctcaccgaaaatgctaatccatttttgcgacaggaaggcattcaaatccaggatctcatctgccgtgcgagggagcttctcgtcattgtcatgtcggacagaatcaccagtccaaatcacaaaatcaatctcatcttttaagttttcttcgatccaacgatatgtctcattcacaagcgataaagccgaatcgcaatctgtgccctcggctccaaaataccccgcggggcccttaccacggtggcacgagcgatcgatcgaggttccgggcttgtagaggcggtcgggatggaaatctgttggtcagcatgaggttacacaacagaaatatcaacatagagaactgtctcctaccagttatatgcaagaatcgtccgcgtacaggtttgcgcaaaccctccgccagctgcccactaggcagctccgttggactgagacggcccaacggctgttgtcccaaggggctggcggagatggcgtcggcaaagaggcccagcagcaagaaaattgactgcatgagtcctctacaccaactggtacaccaagagagaaatgtgggtgaagttcaggacctcggaatattttgggtaaagatcttatctgcacggtcacgtcactgggcgggcgcggtagccgaaccccaactcacacgcgtaaccaatcagaggccggtggtcaatttggggaggaatgtgaagagttgataaatggtctttactgcgaactcagtataaaattagaaagttagagttaatctgatatccaagacagccaatgacttcatcacgtgccaacggccttgaggggaccttgggagttcaggtagaaacttttcatggccagatccctcgctgtacataagaagtcctttctatctgattggtgcaaagtgataggcccgacgtgtctacttcgtactattattcccagtagtattcttcgttcacggtgtatgtgatgtacacgcgaccgtcttgtccgacaaagatctccccttctccaacgaagatcctttcctcgagtgtcatggccacgtaccgccaatcattggtctagaatcatccatcaactcagcgctatgtaggacatttcttacagatgctttcggcttgacgcgaaggaaaaaggggccgctgtagataccgaaagttagccgtgatcctcgatatatatgtaacatggaaagatatacagctgatggttccccttccaccttgtagcgtagcatgaatggcgtccgcagtgactgtcaaatgaccacggatgtaatgtgaatcaactaccgatatgtaaataggtgaacaggccaaatgatatttgttgaagttatggctcacgccgttgtctggagtcctggagatagaagcgatcagcgaaaggctggcgctccgggtcctcctaaacatgtgtactttaacatacatgagctggactgttgcgtcaaggaatgtctcctcattgagtacaacatgaacgtatgggctgtcgacattgatggcagttgcagtcacagtcgggacaaactcgggaaatgtctctatcctagctcgggtgccgggctattcagataggcaggaatgttagtaaaatgagggtcgttcgggatgagagatgcttggtgacttactactgcgacgaacccttcggaatattcagtgcccgctataaagcggcaaacccgtcagtgaatcagtgacattggacaaagtgctacagatatgacctaccaatttcgagttggccgagtatattcgcctgcatgattagtaaaggttatgattgcggatgatatgatggcgagagacttagaagtcgggaagaatggaaaaggaagaaagtaaaatgagaaaggacgagtggcagagggtagagagggaaagtgcacatccatccaacaagcagaaggtcgtctaaacaaacgcacatcccacggtcgccaaggatagacttttctgactttttgacatcggttcctctgtgaattaccgaggcttatacaagcatcatggtcttcactttacgtgatatataatgtgattaatccctacggttatggaaggcatatgatcccgaaccctagccacctaggcagtattatgagttatcttttaactttacataagaataatataaagccttagacagcctgagctatccaagtcattgtggtagtctcattgatagacgtacgtaggtagcatctatgcccagaagcaaaatggagttatcaacggatttcaaagatagagatcacttgcagctatgtactgatgtatatagcttcatagatgcgaccatatgcttgcgcctcctggctccagcttgacccagggcggccagaatggctatgttgcatgctttatgtatatttatggaagcaaaaaggattggccgagaaatcttccaggacacagaggacttacggccagctatatagtatagcttgatagaggacaaagagggttaccaaagaggaagtcgacaaagcgttcataaacagaaaaaggcataacaaactgcacctgtaagcagtaagcatgctagcgcgggatatgaaacaactcttagtagagtgcaagctatataggatgagcttcttgattgataacaagcataagaaacacataatattggtagtgtcgaagttgagtcttgtacatttgctgactcatatgaactgcccgggtggtctagtggtatgattcgcgcttagggttaacccaaagcattaatgcgcgaggtccccggttcgatcccgggctcgggcccattcttttttcttcttcttctttttaaattgaaggaatctaatatggaaatgctaaaagcgtcatgcgaaatgtcattttgattagatggcaagaatatgtgagggccgcaaaagttctgcagatcggccgatagaacgtacttgcccatattaaccacacccttgttttttttcgctaatttaggttgaagaacaataagtatacatagatcccgcacaaatatcctaaaatccgaaatcaatacaaaagagaagaggtaaaaaaaaaaaaaacaaggggcaaatccaaggatgaaaagagggagaaatcgataactaacgtccatgaaccgggcatacatgatgatgatgatcatgtcctggtccatagtcttcctcacgcttatgttcataacaattcatataatgatcgaaagttccctctgcgagcagtcccctgcgctcaagtctaagcatcaggtaacaagcccatagttggcagctctgtagtggaacctctctagcctctgcttcgacagtatggatgttgtctcgatgaatttcaccgagcaagtgtgtggattcgaccgaccagctatcaaatctcttgttatattcgatctccaagttacgattccccatgtagccagtgctgtggagtcgagtgcaagactgagaatgtggatgcctcgtaacgagcatccaatggatgacacccccctgcggcttgcaaatttgaagatggagttcatagtgacgaccgtgatcgtgtcgtcggtcacgaggtgtgctgtgggcctgtgaacgtatagttggtcctcgactaggcatggttacaatatgaaaggttgctaggggctgatatctgtaaaaaggtgtgagtataacgagtatattgacgatttttttgagtggaaagattgtttgctgtgatgatcgagttaattctgagcaaggactcgatcgttcttatagatattcctcgagttcattgactcgtgggttatacaatgggctaataaaaatcctttattaaacacggattaacaaagtctttgttgcctggatgcctttacaaacaattaggctttattaatctaattgtctaacaaagactttctataatctcttccactagcctaagatagctagcgttatgtctcctatattagatgacatcgtgtcttctttgttaaaagggtaaagggttggaagaatattgttcatgtgtcatggaaacaagtaaaaatagccatcaatatacctaattcaagtcaagctttcaattcccagagcggggtaggtgaggctgagatgagatacgatgaccttcacggcttggcatcagatggatggctggtccttgaagggtttgtcgacagcattcctgattatgtcgtaggatctctctgtgcttgttcacatgatttatcttatggcaggtacatgcgctcttactgcattgaacttctgggtatctattatagcacttcgcataggatatttatacatagacatggaccgacttcttcgagtccctcatctcgtgtacttcgtcaaactcattattattcccctccaggatatcatccgtgctagaattatccggattaggtatcaacgactttggtgtcaacctccgagatctaggcgtgggcaaagagtttccaggatatgaggagctcaactcgtatgcgctccgtccacttccggttgttcctcggccggatcgtaatagggatctgatgcaaggtatcgatgccgttatgatgactatgtaggcttcgatgaatagccagcgatcgtagttgacggttgcgacagttgggtcgtcgtctgcgtgagcgaagacttgggtttgcactgctttcataacggaggctgccattgcactagatccaaaataactgcgttagccggtatatattttgaaatgaagtagggattagtggctcacaaaatgcccaatccgaggagtgtgaccaagcccaacttgacccttaacttcaaattcaagttccagaatacgtatgttgaaaaaactgccaggtaaaggtctgtggctgaattaaacgctgttgaagctgattattagtctcagatgtagaccagggcaatgaatggaagctcgtacagccctgataatacccgtagtatgcttggacgcggtaatcccagcatttgtctttcccattctgcgtccagatcgcagaaccatgtccagggcattggacaaatagaatgataatcaacatcacgttagtcacgatttgtaacccaactatgacccacagtatcactctgtgtgatctcctggtgcccagtagctgaatgacaaagacaatgaaggagatgcgacccaaagtaccgccagcaatgccgaatgtctgtgtcaaatagtcgtacatgatgacttttggaacggctgtggttgtgttaaggtcccaaacatggcgaccgaagccatatttgatgcccacggtaatcaaagctgatccgactatagtaagacactgccaggtaacaggtcagttttgatcttccaaaactattacgcgacacgtggactaaccaatgccgacaccataagaatgtcatcccagccaatcttccggatctttatttttgcaatcaccctcaagacgactatgagaatggcgatccccgtgagcgcccaaatgtctctcaggagccttgggccgtggtcgtcgaggtcgcctcgaactgagagagacatatcgctcggtcgatagcatggaatttcccacaaaaaatcagaaaggatgcgagaggcatatctacagatagacatcgatccattgaattccaaatatgcccgatgtcaaccggctatattagccttttatcatatctatactttatcaaaaaaacaaatctcatcggagatgtccatgtggccaacccgagcctcttgacccttgtcaaccctttcagctgtaacttagatagccttggaaagtataaagctgaggacgtccgtcggaggtctccgcttgaaaaagataagatatggccttgacctatgaaacctcgcaatatcccaaaattaaaaatctaggaacgagcccggtaagccatagggcacgcctcattaaaaccgaaccacgtcaatttaaaaacctcggcaattcagatgaatctatgcttccagattgattatatgctttgagaataccatagttaagagtgccaagcctccctattcaggactagtcccattttaaggtagctcttcgggtctaccgcccacgcgaccacgttatttctatcaattctattggctcagccttctatcccgccttttcaggtgaaaatctgccggattaaaacacccattacataatgcagaatcagaccttacataaccccaccggggcaaagctcggacccctcactgtaatgtcgagaaccctaaggttttgatgacgtgtgctaattaatctacgcgagggatccgaacagcggctctcacgatccgcattttcacatgccagaggccgtttcaaggtttgtttgctcgcttagcgataacagttcacgatacggagaggtcgacggtttgagttgtttgccaaggtgggactgccttcatctcatctcttcggagatcccccacgtctctcctctcatttgctcccatctccagtacagacttcgacttgagtactttgctgttccaaggatctggcttgtaataaccgagggatctttggcgacatagcttcggtgggataggtttggtgggatgtcttcggcacgataccctcattcggtaggatctcttcgctaggatcacttcgggggatgtgttcggtgagatatattgattccacggcgggattcttcggtgtgatttcccgtcgtagcttgctcgcgaggtgacatagagcggctacgtcgaactcactgtagtcaaagagcggagtttcttctttctccatgttgtgagccaaaatgtttggggcagggagttgctctgcttaagacaacttggtaaatccctgagcagcgaaaaagtgacataatgggcaagtatcagatcccaagggcgtcgttcccagggaaggaacatcacatctacacacatgaccagtaccagtttggactatgagatatcgaagttgaattctccgtcatgccgtatgtttacttggggtatgaatagtgaaaatatagaagtttggttgttaaggtagtcggctgcggatggcagcagcggcattgtctgatcctccactcgttgagtaaggtgacattggcttatgcgccttcgcggacgaggggccctccttggcccagtctagaagatctgtatatcccacgatcctagtgttttgttcatcgtcgcccccgggaacgctgaccaacgatacgtactagttcaaacggccagtcgtctgttctgccatcttgttggtcgttggcctagtaccactggggatggggattttgcttctaagttccaggtattgaggtcaattgagctggctggctctggaaaatcggtgagagcttaagggtttcaacaaggtgagggtacttcgattcgtcaatcaagcgagagtaggtggctgggtcgagactgcctaaagcggagtttccagcgacttgtcgaaataggatgggggatagtccgttttgagttagtgagtctgatattcttctgggacgaggtgcgtggaagatcccgatcacacatggggggttggagccatttttataggcaaggtttcttggcttggtgatcctcgagcaaaagaggagagggctggaagttcggatgccagctcagagggtttcgaggtgctctgtattcctgagtgctaaacccgcgctcataacttgttgaaagagcttcttgggaatgttttcgtaattgtgattttctctaatcacatgatatacgcgtgattattttggcatgagaacgcgtcaaaaaattactaggccttgtggtcaacagcattgcagcccctacaatttactcttgacaaggccattacatcccatacaagcctaacaatattcttactagtatggtgaccccagtagtaaccggacgtttgcttgttctccactgaatatttctcattggaaaaacatgcgacctggtctacagaatgggaactgtttaaggagtaattcataagatatcaagctagtttgagaaagagacatttgaaattcaatcttcatatccgacaaaataagataaataaaacagaaaaggttgtatagtataaggaataaaagaacaagaaatcaatacctcgccagatatatttcaatgaagtgtgcataggaaaatattcattcttggctggttctgccttcagccatgtcaagaccccactcaaccttgaggtctgaagtaagtatacccgatttcttgagaatcatctcggcaagagccgggacagattcactggtcaaaatctcaaggatctgcaaattagcttccaactcgcgggagatccagtttcggatctcgataccgaccagcgagtccaagccgtaaaccgtgataggcgcagcagggtcaaggtcttccatcggacgcataagaatgctagagatcttgttgagcacggcagccccaacaatggcctcggctccttcgcgggtcttcgattgccggataacaattgctggtgaaatctcggcaccgctctgtgcagactcggccaatgcatccccgccagcgagagtagagaggcgcaacaggtgcgacagcttggtatcgtttacccagaagggctgttcactggcaggtgtggatttgactgcttcaaacccagccacgcagtgaccctcgcatgaactgtcgaactcgttgcggattgctgccgttacaagaccacggatatcagttgcatcaacggactctgtgcccaattgtttggagattgcctcgcgcttctgatcgtcggagagatatccgactccacgcacaatgggcaaatcgattgttgaacagcgcatcctggctgtctcagggtactgggcgagcgcagccatgaaggttccactggctgcgtatggtgattgacccatattgcctacaaaactagcggcggacgataggttgatgaagaaatccacggtaccattagttgttgccaatgcccgttgaacgttccagattccgtggactctgggcatcatcaccgtttggtagtccgcaaaactgagcttttcgaagagcgtatccttacgagaaagttagccgagatcttatctgttgtttgatgctgataaacttacccggagaaccatggcgccgtatacaacaccacgagcgggaggcatgcgagcgaggagcggaacaagatcttgctccacgctctgttggtccgccacatcgcagcgacagacttccacattaacaccctggcggataagattctgaacagcttgctcggccttttcagtcttaataccacttcgagaaaccaggataagattcttggctcccctctctggcatccagctggcaatgttgaggccaatcccaccggtcccaccaacgatgatatatgaagcgtccgcgcggaggaggttttcgtctcttctggcgggatagacctgtgtggtgagttagcgatcatttgctccaattgtcgtagatatcagcaaacataccttaaccatggaatcatccgtgacctggacgactatcttgccgatcacctgtccaccctgcagcgcacggaatccaatctcgacgtctgagataggaagagtggtgacagaccactttgattgggcgttagtgtcaacaaacagcttaaacgcatcacgaagcagccgcttcgtcaattgcggacgcttctctctgaccattcccaaatcgacagatgcgaaggagatgttcttgttaaagtgagacatctccaaccgagagtttgtcgtgatgtcccgcttgcccagttcaatgaaacgaccaaatggcgcgacacactcgaatgttgcttgcaaagcatcaccgctaagcgagttgagggcaacatccacaccctgaccaccagtggcgtgctgaataccctgcacaaatgacatgtcacgactgaagaagatatgatcctctttcagctggtaagtttccataaggaagtttttcttttcgaggctgccaacggttgcgaagatattagctccaatgctttgagcaatgattattgccgcttggccaactcctcctgcagcggcgtggatcaggacgctctcatctttgctcagtctccccaagtcaatgagagaatagaaggcagtacaaaacacagctggaatcgaagctgatgtctcgaatgacatgtcgtcaggaataagcaaggatccagaggccggacagcgagtgaaagttgacaatgaacctggtgacattgcacagactcgatctccgatcttgaagtcggacaccgcggctcccacttgagtcacgactccactacattcctgtccgagtctttcaccttgaagctggcccatggccatcaagacatctcgaaagttgagaccggtgctgtgaacctggatctcaatgtggtcttccggcagtgctccgttgcgggaaacatcatctgtgaaataaagctcatcaagacccctcccgtctccggcagcaagtcgcaaagcccgatcttgtttgaaaggctgcatctggggaggggcatttggtgtctcttgctggacactgaggttcaatgtgttattgtcaaccaagcggggcacacaaacattgccatttcggacaacaaactcccagtcattctgggccagctgcgatttctgacaaaagactccgttaaataccttgagcatatgcttcactgcctcagcgtcgggcatgttctcccgctctcccaggtcaagcgtggcgaattggagcccagtctctgatctcacagtgcgagctaatccaattgccatgttcgcaccaagcgattccaaatcggatttgctgtgacgaacaacccacagtagaccccgagcccgactcagaagacgctgcaatgcgttgaatttgtcttgggtgagatgcgataggatcgagcgatccattcccccaaggaaaatacaccattttccggtaacatcaacctcatcagagttgacagccgtgatggggtcaaccccaatcatctccttgagaccagattcgagactgagcgacgaaaaagtgccgatcgagtcaacgccaagaatcacaacatcaccggcgtttgcgggaccggttattgggatattagcagtggatgtcatgagacaaccagattggaaagatgctccagggtactcctcgacacacaggtcaaccccggagaagtcattctccttcatcacattgctccatccttcgacggtgaggaggggtccgtctgtgcggaatttgtcattggccagccaccatccagggaggagtgcgaatgggaagtggcgtgccctggggacagtttcctcgatgagtataaccttgccaccaggcttcagaagtcctcggatgtttgccatcgtctggctgatgtcggtagtagcatgcagcacattgcaagcaactacaacatcatatgtgccattggtgaagccttggccagtgggatcagccgacacatctagtgtctggtatgtcatgagatgtctccagctctcgaactttgtcttggctttttcaaagaagccgggagagatgtcggtataagtgtagtgcccaaaccgaggcgttgaccctggttcgccgcccagactctgcaaaataggcatggtagcaccgcctgttccagcaccaatctcaatgatgttgagtgtagggttttgatgtgccatcttgtcaacgcagacagaggcattggcataggcctcgcgaagagcgtcaagatcgctgtagtatcttccgattccatcatcctccagaagtacactcaaggcgtctacctcgcccctgaggatttttggaagcaactctcccactttgaatgccagctcacttgctccatcaacggttcggctttgttcaaggacgtcaagtgataaggcatctttggtgcccgcctttcggcaagttttctgggcccaaagatagaattgccgatgatggggctcgaaggtagacaaatcatcttctgtcacagagttgaccatctgtgcaaggtagtactctgccacatattcgagttgctgcattcgctcaatgccttgggcaacatcagtctcggggcgaggaagctgtcgataatcttcggcggagaggaaatcaaagcagggctcatattgcatcttgtagcaaatctgatccggcgaattgtccgttgagcctttgatatcattcgatatgggaaccaaagtaataccattgatgtcaatgagcagattcgccgggttgctgggaacggtggcgaatatgcggtttgtctcagggttgctcgcggactcgtttcctgacccactaccatagagttggagtacagtaccagcacttatttcgtgggacaatgaaacggagatgtgcttcacatgcgatggcacaaaggtggtatgcggcccgggttcgccgtagccacgaagcagccacatgacttgactacatagatcaagtgtaacaggatgcagaatgcagggggtctcatgcccatgtggcattgctgccttcgtgtctgggatgcgtaaggtagcgagtgcttggccatccctgctcacagaggcttcggttagcccttggaagagaggaccgtaattcacaccaccgttggcgatattctcgtagaggaaatcgatatgcacaggaatattacaggaacttcgcatattcaatgcttgttgagtgaagcgtgctgtcttctcgagctcttgtcgagacccgtcgacaggattgacatccttcgcttcttgcaccatgatgaaaccattgcagtgttggtcccatccgcgaccctcggtccatgagaaaaccttgaactcgtgccagccgaggactgatttgctgggggcttccgatcgggatggtttcaaggtgagaattgtctccaccgatgagttatccgggatagtcaggacacggttaatgaagatatcgcggatatcgatctttccgggagtgacatggtgcagctgtgcatgttgtgaaatagcctccatggccatggccaagaatccggtcattggatacacagtgcggtcatggactctgtgctcgcggatccaagggtgatcatctgcacgaatgatgttcctccacctaggttcaaagtcgacattctccatgcacaatgagccaaggatatcactccgagggaattggggatggaaatggttatcacctatccgtgagctaaaccagtatctttccgagtggttccacggatatttgggcagatttgtcaacaaagctggctttctcgtcgttgtcttcaagttcgggaagttgatagcttggaagtcgagattcagaccctgtgtgaacagcgagccagctaggttttggacagcttcgatgtcatctaccttgcgtttcaaggtatgaagataatggacgttggaatttggggcgtatttctgcgcaatgtctttgacaggtgtctgcagcgcagggtgagggccaatttcgactaatgtggtgattggcgtatttgcctgctcatcggtgataaggctcttcagaccctccacaaactccacacgagagaccagattgtccacccagtaggaggcacccaaggtgcttcctgggaccaattttccatagacagtcgaatggaatgaaacctcagagtcccgaggtgcaatcttaccgagtaggcatctatattcgtgcgagacaatcttcatatgatgggagtggtaagcaacctcaacttgcaatctccgggtgaagatcccttctttgtccaaggcagtctgcagatcgtcgatgacctccgcgtctccagacaaagtcacgctggactcactgttcacacaggcaatgacagcctggttccctcgcatagcatccaaaatttgctggatgtctgaggcgctggctccaaccgctaacatacctcccttgatagacttgtcatttgctaccaagtttgccgcgacaccacgagagtacgccacacgaacacattcttcgaaattcagaatgccagccgcgtaagctgctgcaatctctccgctagaatggccgaccactgccttggggcgaataccccaggatgagagcaggtcaaccaacgctagctggaccgcagtacaagccggctggctcatatatgcggcagaaatagagctcgcgctcgggtcggtcaaaagcaattcatctttgcattgcgaggttagtgtctgagtatatcgctttgggcagtgtcacaattgggttggagacatacctataattgagaacgtagcaccgaatgatttcaagcaagcgtcaacattctgcatagtcttcttgaagaccgggtaggtgcccagaagttctttgcccataccgtgccattgcgcaccttgtccagtgaagacaaagccgacagtaggctctttggaagaacgaacaggcactgcgtcgttagatagagatgcattcagctcctgtccaaggattgcagagcatgccaacctccatggcaggaatgttcgtcgctgtcccagtgtataggccatattatccaaagtgctatctttgaaaacaaccgggaaaaggtcgaggtatgttccgattgatttcccaagctgaagagcagcctgtttatcgtacgcagagacaacatacaaccttcgcctgagaggatcgttgttcgctgcaaggtcaccttcgtgccggggaccacgctgtaggataacatgggcattggtcccgccgaagccgaagttgttcacacttgcgtatggtttgccacggggccaaggcatgagcttcttgggaacctggttggatgtttagctcgatccattgatacctcaagtcggtgcttgatcttaccttcatattccagtcttccatcggtatctcatcatttgccttctcaaaattgcagtttgggggtacgaagcctcgctcaagtgccaaggtagttttgatcacagaaacaacgccgctggttccttctgtatgaccaatgttcgattttacagacccaacaagcaacggttgacgcggagtgcgtcctttgccaaaaacggcattcaatgcagtggcttcgaggggatcaccaactttggttcccgtaccgtgagcctccacaaatcctaccaaggacgggtcaatgcgtgcctctttatagacttgacgaatcagttcttcctgtgccttgccatttggcattgcaatacctctggtccgtccatcctggttgagaccactgttgataattacagatcggatagcgtctccagcagcctccgcatcctcaagagacttcaatataatacatccagcaccttcacctcggccaaagccagtaccgcggtgatcaaatgcatatgagcgaccagtgtcggaaagtagtcttggggattaatcagcttttgtgggtcaaggagactgccagtgacacttacctagaacgtgtcattgagatgaaagtctcgggggttatattgaggtgacatcctcccacaatggccatggaacattcaccgttccggatactctgagaagccagatgcagagcagataagctggaagagcaagctgtgtcgaccgtaacactaggcccgttcaagtcaaaataatacgaaattcgattcgcctgcaatgccacggctgttccagtggcagcatacatagggatagccgtgatatctttggtgttgttgatttcgtagtctgggtatgaggcgcctgcgaagactcccactttttggccactgatctcgtgactcggaattccagcgttctcgagggcttcatacacacattcaaggaaaatacgctgttgcggatccattgatctcgcctcttggagtgtaatgttgaaaaatggcgcatcgaataggccaacgtcttctttcaggaagtgagctcctactgggttgaaggaacctggtcgatctggatcagggtgatagaaggactcggcgttgaatcggtttttcgggattagcgaccaagcactccgtcctcgagaacacaggtcccagaactcttcggccgtggaaacgtcgcctgggaggcggcaggacatgccgatgatggccattcgcttgggcacatcgcctgtggcattatcggcgatctcactaggtgcttcgtgcaaaaatgcattcgcgctctcggcaactggagttccagtcccggagggctgttgaaggcgcatctttgatagattcggtgtttggtttgaagatgtcgaattatgtacctggctgtgtcccaatgtccaacaagtgtccaaagagacaaatatggatttgcaagaaaagatatgtatagaatagtacaatcacagagcgttcgaaacaggcactcggtccatccaagtacttcctgaaaggcagagagtaaacaacaagggcgtcgagatggtttgtacaacatagagtgcgaaccgcccttgcataaacacccaagcgtgcgcgtgccgatctctgtccagtagtttcctgattgaaacaggggatttaaacactgaatcgggcaatgataggtcgagagaacgcttatgtctgtcttccttgatgacgaatctaacaactcgcagggacgtcaatgggatcatccatgcatgaaagtatcccctcgattcctcgttagaggtttccaggattgtagatcgagatcagtacatctgaccttgtccatgtatttgcaatggtctggatagtgttttctccgatgcccttgctaaggcgagggtgcgttctccgtacattccaaacacaggggcaaactcccgggaccctggcagattcctgatggcataatttgttattggtgcctcctcgcgtagcaagtatctttatagaaccctccgggtggtattccacctcgcttttttctccgaagatattccccagttgattatcgcgatgaagtttctatgtctcccaggtggctattgcagtgccaaggtatgtcaagcattttgtcacgtggaataaaatcatctgacgccgactatacaggctctcaaaacacagctaggtaagaagctgcatttgatgcgatgaacgtcggagagaactaatagtgggtacaggcccgttctgcgatgccctcgcggccaatggaaatgccagcttccactacacgcagggaaccaccgaggtgcatgttcccccagaatcagccgggtttttcggtccgccgcccaactataccttcattaaggttgatgagcctccactggtccatacgaacttgagtgacttcccgaaacgcgacaccccggaagaggcaatgaaagtcgccacaaaggcggctggcgatcccacattttcatgtatcgctgaggtcatggaccgtctggtcggcattcttgacagtgaaggcgacattgatggtgtgattggcttctctgagggcgccctaattgccgcatcgcttattctagaggagcaaagaagagagaaggaacttggtcgggcacctcgacttaaatgtgcgattatgttcagcggatggccaccggtacaccccgtgactggaaaagttctcacggctgacgactataatgaagagccaatcactattccgacttgccatgttgtcggtgcatcggatccgttccttgatgggtcaatggcactgtacaatatgtgcgatccagatactgcggacctgtttgatcatggggcaggacatacaattccaagaaagaagcagactgccgatgagattgctttagttgtacgcgagatgatcgactgtgtggcttgagttttcctttatatagcaacacaccagaaacaacatccgataggctagatttacgcgctatcccggacattgggtgcatttcatgttctcataaatatagaattctcgcactagtctactccagcagcggccttgtctctgcttcttccccctactcaaattcaatctgaccctctgttcgacaccattgaggaaagagaccaacaaaggacgcaagtcccagatcccaaactcaccccctagtgacctccgcccttcctcgtcagcctgtccatacttcgccgccttccaacgccatcgggtccggcgcacaagccacaattatccaacccctagaacgcccaacgccaacatcccgagcacagcaactattactgacagaacagtcaaggtactcgcatggcacccaaatggcagagctctcagctcccatatctccttagagccaagggggcagatgctttctgggccgacaggcgcaagtatcggacccgtgataggttaggaacacaggtcgaggactataccacaacaatcaatagtcagcagcatatgacatgtctgataaatcaaagcaaaagcaatcatgagatccgtggtaggtgaaatgtggccttgaaacccccattctgggggctggggacgcaagggagcaggatgtgaaacgaatacgaggggaaggttcgcatatcgactgcaagttaccgggaagggagaggaggggagaatcagactcgactacgagaaaaagctggtcataagagaatgcgacctactatacaatatggaaaagcggatctctggaatcagggttgtccaaggggaagctagagttttccaggccattcatcactgtttacttggttaaataccatgtaaggtggttgtggtatagctggttcctgtcctcaatagtcagatttcttcccttgcagacagagcactttgcccctggtgagttgcgggtgaatgtatagtgagataaaatatttgcgagaaatcccatgtgttttgtatagagcttattattttgcaacccaacatgagactatcaattggatcaaaagttgcgcagtcatgcatttttgggctgcggtacttttgccactgcatcctcagggcatctacaacgcacacacatacaagtcccacatgaagggtcatctgagtcactgtggtggtacagagtaatattatatagacttgatgatcgcatgacaccgtggcgtgaaaacgtgataaatttatcctggtgaatcgcgctgaaaacgaactggcgcagaaataccaaaagccacaattgtcgctcatcgatgcataacaaaagggaaaaggagatgttttcgctcaaggaaagagggtaaatcttgttcagaccacgcgcttgacctaaatatggagcattagtatatcatcttccggtgtctcaatcaaaggaacccacgtacctcgaagaatctcttgagccaccacacctggaacacaccctcgccaataaccaccataagttggaacatgctccaccacttcacgcggccgttcgtgctctctgcagtattgcggtgcactcgctcgcgcacgacgatgtacgactgctcatcctttacctgcgtcaaagcctcgctaagtttgcggactagatggtaccagatgatcagtcacaatatccttcatcttccgtcggctgttatttcccacgcttaccttcgacctcgaggggatcctgcgtcatctcatgttcgggcacgtagacaattccgtggacgttgaaggagacctccttggagttggaggtccagccctcgttgctgaagcagtagttgtatttcccgtccagctgtgcggtgaaggagtagtcgtcggaggcaacagcttgcttgaagtactggcggtttctcaggggatcctcgacctgcgacgaccgagcgttagcatctagcttattttgaatcgttcctctatcatgatttagcagctggcctagtccgtaggtaggcatagacctctcggtttatagatccgatatcccatgccagagccaccatcagagcagaagcggactccctagcaacaccgggataattcatacccagaaatcaacctcaatgttattgctccctccaaactcccgatctccaacctggaaagtgacagtcatgacatcgtcgcggtgcagtgactcgtggaagcattctcgtgagtgagacttgagctggatggtgtgtgcggtcgcggcggtgatccaccccagcgcggtgaccaggattgcgcttgttgaaaatctcatattggaatatttcggctccgatgagtctggggtgattgacgagtgcgtgggtggtgatgttggtgttggccgtcaacgtcaacgtcaacgcgcaaggtgtcaattggcggcgctcggaccacttcagtaaacaccgctccgccttgagattcagtcttggctgtatactggagttgggtggatttagattgtgatatgaataattatgttatggttagattcaatgggtctctcgaaggattggcgtctattcgaatgagaatctaacacttgtaaagttataccgcaacatatatatcgttacattgtacgtcaactacaaacagcgagagtctttgtagttatgtacaagcgtactgaacacttgcataagaagagtaacgtagcagtggtaaaaagtctgaattcattttgaaatagtaaacactcgaacagtgataagctacaagaaacacaacgggaaagcatgtatatcaacaagctacatccgacaatatcacaacaagggggggtacatgataatatagaacagtcaaaaaataatgaatgacagagattgactattaatatgtatagaaggcatgtaaacgataggacatgaaaaagaaatgtaagtaggatattcaatgtacaagttctttggggagatgagaggtaagaggcaagcggaataacggggtggtatcaaatccgagaacgcaaacattgatcaacggccatgaagccggaagatatgtatgtatgtcgaaagggggaatatggatataacgagaggagagaaacccgaccaaacgcagagatagcaaagatatcacagattgaggattcgtcctgtgggaatttttctgccgatagaaaaaaaaaaaaaaaaccaaattaaacaccgagcggagatggagttcagaaaaatctataggtaagatcaagggcagcagaatcactcttcctcagtggagggttcatcagaagaggaaacgtcagcgtcggcgtcagcttcgttttgaatgatatagctttcttcggcttcagcctcatcaatcgtaggcccaaaaggactctcattatccctctcccttggcgaagccgagaccatcccatcaacggtactctcgttctcatccgcgaagctcccatcctcgtagttcgccggctcggcatcatggtcataactcgagcgacggagaagaggcggcgtctgaggcggctccatggcaggtacctgactgcgaaccgcgccacgttttggggctgagttgaagcttctcaaggggcgagtttgcgcaaaccgtgcggcagcactagtctgcgagccagtaccgttcccgcgggcgtgggagctcgggggtgttagtaggcctgacaggaaagtactcgcgttgctgggctttgacggggtctgattggaggcgttggcggcggattcgcggccttttcgccaatttccccaagcggcagctgcagctagggggagggagcggggtgaggcggcaaggtcggcgagggacgggaggttgccggatgctagccgttctttttcttgctgctgcatttggagattggccttaagacggatggctgcgtcgcggacggcttgctgattgaatgcgggcttggacacagtgtcgattatgtcttgcaggtcgtcaatgcggacgcctaggagctcacgcagccaggtgatctcggtgtctttctccttgatcttatttggcgcatctttatctatcgcggagacttcctgttcaagctcctcgatacgtgtctcgcgctgctggagctggtcctgaaggacgaagattgactcgcgcagggcttgaggggagatccgttcgggttcttcagatcccttgttgtatgacatggacggcgtcgcccgcgagtgcgaggttgcggcagctgcgaccgagctgggttttgccttggcgctgtgggctgcctcagcagcagcacgggcagcagcttgagcgatctcaaccttctcttcgaggagatttacgcgctcttggagatgcttagccttgtcctcggacaaagccatccgctccatgttatggctttccccgcgtgcacgatcctctgaagagttatgcaaagcgcgagcgtgacgttcgcggaggtcattgagaatgcgctcatgcatcttgcgggtctcatcgatggcaagatccttagctgccagggcggtggcctttgagtccctggcttcctcgaggagaagctcgtagcgctcgcgagaggtatcggtatccatgcggttgttatcaagttgggtctccagacgaataatctgagcctccagctcggcacgcacaatgttgacctggctgttagcagcttcgaggtctgcctccatcgaggagcgagtgcgctggatctcgacgcggctgctctcacgggcttcgacaaactctcgctcgaaccgggcagccttgatctgcagttcatggttctccgcccggaggctagtgaccaactcctccagtctagccttgtcttgctgagattgctcatggacgaaccttaactttgtggcctcccgttctttcttttcgaattcgtagacatcctcctcaagcttctcacgcaatttgagctcgcgggagtgtgacgcgcgcagctcattatacctggcagtgtggtcttcctcccttctgcgccagacagcttgatcgcgagtaatttcagcagtgacactgatcatgtcatcttggagacgatcgaacttttcagtgaggttctggcgcgagatcatgctatcctcaatgcgagttcgcaggtggtcaacggtctcatgaagagacttgttctcacctctggtagtttctaattgacgacggaagctatcgctagagagacggtactcgtcgagggtaccctcaagcgcgatgttcttcgtagacaactcggcgatagtaaccttgagagtctcgctctcttccataagagactcagtgcggaactgcatcttctcaaagtaggggatcttctcttccttgaactggagcagacgagactcggcatcctctgcagcagcactgtgacgagcagcatcttccctagcaagcttcaatagtcgctggacctcagtcatagcatcctgcgcgtcacggcgatccttgtactcctgctcggcacgctcatcggcaactcgcaacatacccttaaggccctcgatctggagcatcaggctgtcggcaccaatctcctcggcctctgacaggcgcgggctcgggggtttctgcaaggcgatctgctgagccaattgcttggccatggcttcctcgagaatctcgcgcatatcaccaacagggtcctgagcgagcttcttgatcgtgagagcctgcagttcagcaatgctttctttcagctgcgacatctcgtgatggctagagtgtggggaaatgcgttgagggatgtcatgggtaatcaaagcttccataacgacattcttgagcatttccagcttacgttccctcgtattgtggggcgagcgatcgcgaaccgaagcttcctgaccatcatcgtcctcatcatcagcatcactgtcttccatctcagcggatgtgctgcggaagaccattctgcttgcagtgccactggcaatagaagccaccgactgctgaatgacagccaaggcacgttccacagggcccaaacgatcatcgatcgcagagccaacaagatcgttgatacggcgatcgaagaagcggttacggttcatgaacttctcgtcctcaccggccgatatcatgtcgtcccagtcactgacatggtcattttcagtaaagagctggcgaacaggagactgcagacgagagataaggctcttctgcggagagaaggtagcattgctgttggcatccatgtccgagccatgtttgggaacggtgagtttgtaggtcttggggactccaccagggctcggactgggtgcttcgctgcgggcatccgcagagccaaaccgcttttccttcgtgggaccgcccatcgactctgtgaggtgatcgtgtcgcggctggaagggggtcgcgtggatcgtttggtaaggagtcgcgtggcgctcgatgccaacatcggcgtcgtcatcgtttagctgttccataattgcattcagctcctcgtcgtcaggcgagtcgttctcggagtcccaatgactgtcgtagtgcttatgcttgcgggtgatgaagtctggttccacatgggttggggcgttggactcaggtttagcatgatgatctgacgtggttgtattcttagatgggccagtgacagcgaatcgagaatccatgagtccagcttgcttgtgtttcatttcaacaggactcgagagagtgttttcgatgggctgctccttgacgatatttgctgcaacgggttttgtttcagcaaagctggaaggctgcacagtcgtgggaacaaatttagaaacagcaggcttgaactcgaaaggctgggcactagccgatagcatagtggtcttggtcgagctcttagatccatgaagagcatggtcgacatccttcgagacagtgacagacctatcatctcctgctgcaggctcccttggttcacgttcttcgataacaatgtccttagaggtccgcgcccggatcggcgatccgggttgagacccgttctcggcctcacgtttcgcatcgaacaaagtccaagtatcagcttcactgacaggggtacccgtccggtctaccagattattctctttgggaatggcattctccttgccgtcagcgacgacatgcagcgcactcgaagcttgagcattgcccgcctcgcccagaggttgggtcgagctactatatgtagcctcgccctcagcgttgccgacaccgcgacacgcacgcttgtggcggtcggtcggtacaggtcgaccattggtgtcgtcttcaacggcctgctttttgtcattggtctcctgttcgatttcatcaggtcgcacaataggaatagctttagacttcttctcgggcgtggtaatcttgctggtgtcaatgtcgccgaagattttggtgcgactagccggaggctgctcggagctggcattcgagttgaggccaatagaggagttggggttgaaaacaggtgcgtcaacattgaacgatgcggcagagaatttgaatccgccactactactggcattgtggttcagcttagaactcattggtccattcacattcacagtgctaccaggcacgaacgagggaggcggggcaaaaccaagtccttggcttctgccgaactggaatgggtcatttccgaacggcacaggctggggattgaatgatgcattagggttgaatgccttggcctcaacgttgagtgatgaactcgagagctgcgactgatggcccccgtggtaggagtggccgctggcctgtgtctcgtgccacggtccttggcgagtctgtggcgtacccgcgacgctgggatttgtgtcgaggtcagacccatcatgaccattctgttggtattggtctccgtagatttgctgaggaagctggtgctgggcgaagggatgaggcgggagtgggtggttttcgttttctggcaatccccagcccgacttcagtatgccggcattcagccctgcatggccgttgacatcacggtaatcatcctctaattgccggtcgatcgagtcttccaaatgataatcggtatgtgtcatctggtccagccctctttgcagagtctcgctcagattatgaccgtgacctcgaggtgtaggctgggcaatttcgacactcgatgcgtggaaattatctgggtgtccattgaccggggtcttaggagcctggtatggcaggccttcctggtgcataccatggccaaattgagcatcgaacacacccttatcgttaaatgccgggtagaaagacccttggtcatgtagcggagacactggtgatagcatggaggaaaagttgcccatggcccctggcccagccgaagaagttggctgccgggggtttatgaagccttgaggagtcatagctccctgagcaggaggcgtgggctgaaattggaatgggaatccacccatcatattttgatccgcacccatgaatggcgtctgcataccgaattgcgaaggtgatgccatggttcccataccaccaggcgtaggcattgatgattgattgaaatgaggcgagaatgggtgaatatggccgaggggattgcttgctgcggacgcagtaggaatcggcggggatgtaacaaggcctgggaaaggcgtgccgctagggtttaacgagtaatccggtgaaatggattgtgcaggttcatcatcgccgaatgacactcccagggcgcgtagcttttcttcttggagctcggtgatataagcctcccacttggccctatctgggaagttgacgacaagtggctggctcttggatatttcatggaggtcatatgggtcgggatataagggtcggctgagacctcctagagtcgtcattgtggaggggtcctcggaatcgccaatggtgaatccacgaacatcgtatccttcgtcctcccattcttgcattcgctgctgaacgtcggccggtgttaggagacgatacccaggttccgagcctctcctatcgtcatttggcagctcgattatgcaggctttcccacgccaattcagcttctttctccgtcgtggtgtcggggtggctgccctgctgatatcagggacatgtatttttaatggacccgggttgaacgggtcttccatctgtgcagcgtcctccatcgcatctgcaggcggaggaggtaacggcttgtctatcggcgagtttacctcgacggtaggtgtgtttgaatttgacatgttgtcttgcggtggatctttatcgtaagcgaaaccccaaaaatcctcctgccgcaaggtatcagcgcgtttatgctgacctttgttgccttttgcacgcgcagcggccttcttcccgacgaaatcagagagcgttggagttttcaatagatcgtcggaacgaaagtcgtcctccaaaccaagccaatcgtccgaagcgtcgtcagcgaagtggtttctcgcagtgataaacgatggcgcttcacttccagagtcgtcgctaagccaattgctccgctccgttctaggctgaccagtaaggtactggttgatccaatcttgcgtgaagtcccgaatcgatttatctccgatattggcgacgagatcgcggtccacgggtacaagtatgtcgtcgttcgcgatactcgatctccgcagctccgtgtggttggctactgacgagacgggcgagctgggaccagatccgttgtcgatctcggagagttcgagttggctattggtcactgacagtctccgagtgctaggtgctgcatatggggatccccacgcggtggtgtagtagatgctgctttccgccttgcgattatccggcgaagaggacccagatccttcggttgcgcgatatgaggataggaatgggagaggcgggggttcaagggtgatgctccgcggagaggttcgttgaccgggggaaccaacggtcgacggactcgagtcttccgatggcggagacgacaagagtagtgagggagccagacgcgattcacggatgaggcgcgtgtctcgcgactgaaactgtggagaaggcgccgagaaggcggaaaatacggagtgatctagatctgtggacattgaggtggttagactagcatatttggagggatctagagtgattgaatcaagggagttgaagaataaagtccacgtcacggtgtagcgcgaaatagggagaccaatttcacagtcccaagaagggttcaaagagagataatatcaatgcgtatacacaccttccgtgtcgactcctgcagcaagcacttgcttgccgctccgcttatcgtccagaatgttgacgcatggaaatcaaaccggaattgaagaccaccgctggcaagacaacctggggccagataatgtacaggttgtctttttctggtttcgggataggcacactttgcaagtgaatgaaagtaatggagagatcagaagcacggtcaagtctgaagtatcgaagaccaggatggggaactaaggggaaaaaaaggttggacgtcacgggtattggatcttcgtactccgtactgggtacctcctagagtgtggatagcccgagctaatgcggtgtacaggtacgataggcccattcaacgctcactagtattatttgtttagcgcagaccgaggccgttggtttagctgtgttggcttggctttcccgacaaagtcaattgctatatctacgcatagcacatgtacccttaccttttagatccagaattaaggattgactgtaagttgaatgctcatggccactactgtgcttctgctttcgaagtagagtaaacaatgaaaactggagttcccagagattcaggggtagaagaaaagctttccatggatttgactgtaccgtaccactcccgggcgccgtccacggaccctattcgcagcatgactaatggtttgtcttgtcacgagccaatcagcgtctatcgtacaacaaaatggttctaaggagcgtatcttcatgctgattggtgagattttgtccacgggagtcgggtaatatctgttgccgccccgagactagtctaaaggactcgatgttgaactggacgcggagttcttttttatcttacccgcgctcttctccgaaagtgtcagatgctgataatacaagtacatattttgtattgtaactgctaattgaactcagcacgacgctgcagcaatgcccatgttattatttacttatacaatcaaagcagttaagccatgtagccatatttccattggagtaggagataagcaaccccagaataaatcagtacaatccgaagaataaaccgctagtcgcgggcaaggtatcaaagcaaagacacccggatgaagcgaacaaatagtcacaagtcgtctagttggggcaggaggtgtcgaacttgaccttgcggtccgcggtgaacagaccccagtgcttctcatccttcatctcgccattgtcgcccttggtatcgggcttccaggactcgtcgaaggcctcaaagtagaacaggtcaacaccccagtcgagcatgccacagataccagtcttccagaaggtctgagcattcttggtaccggccttggcagcctcatagtcagagccgccatcggtgggccagccggtctcaccggtaacaatgttgatcttgtcggcgttgtcgccggcgatcttctggatgtgctccatggcgccggccatgtcatcgaagtaggtctggtaggccttgtcggcggcagtaccctgccagtaagcaaaggcgttggccaagctacagagagagtcagtattagtgcgcagagttgccgatttcttctacatttccacttacacatatgtcacaacgggctcctgggtgaacagggcgtcgccagtgccgtcagcaagcttgttccagctctcggcggtgccgacaaggacacccttgggcacattatccataacgtggctgatgtaagtgtggagctggggtccagtcaagtcaccacggtagagagtctcggacccgacggtgatcgcatggatgacatcctcgtaaccgggaatggccttctggatagcggcccaatctcccttgaaggagggctcctccaaaagattattggtatcggtaggcttgcccaccctaaagaagtaaaaggtctgttataagaatagttccgattagggggcgagaggaataacaaaaaacttaccacatgcccagaacgaccttgaagcccttgtttttggcagcaggcaggatgttttgaggggtgttgcactcagtgccggagtaagtacggacgagagtagacaggctcttcagggcatcgaaatccgcctcatagtcgctggtagacttgcaggtaccgtcggcgttcttgtcaccgagggagaaaccgagagtgcccttagcagagaccagggccggggccgcggccaacaggagggaaacaacaccagatgcacgcattgtgaaagatgaggtcgatgaaagagggtattcgaccaaagagtgacgaaaacgaaagttgaaaagaatgtaaaaagttataaaatcaaacgaaggtacgtcagggaccaagaagaaagacccagaggattggagattgggggggaaatgagggtttagacctttagaccctgacgggtctggggctttgcctaatgtggaggaaggtccccactaattgtgtatagggggtgagaattgagccaatcaggaggaaggaaactattcttggatccatggatgaaacagttcccctttaaagggtccggatatgttttggtgatgtatgactgtgactttgtcggcctaactacggagtataccattcctatacccaaccctctcctatatttctgctcctcggatcatatttccatctcacatctcagcaagaccttgtatctaagagctaagtctgatatctttcatattttacatgcagctgcagagtcgtgatatcaccttgacaaagcccagatgccaaccaaggtagaagcccagaatctggaaagtcccatgtggagagaaccgatcggatggcaaagaatcacattgtgttgtcacaccgcccctatcctattactcgaagagaaccacagtgacatgtctttggaaccggatttcctatggttcactagaatctggccaggtcgacctccctacacaacactctttatcgcctctatggccgggagtaagccatcctgaaccatatcgagattacaacgtcactaagaagttggtagagactcgaatgagccgagtctctattgttacacagctgtatcaaaaatatatctaacattctttgctgtataacaacctgcagacattcaagcgtacaatgactattctcatagaaggacacgcgcaaaaggtatgcatatacggagtaacatacggagtagttagacgtaccttacctcaaaaactcattaccaccatcgatattcaactcagagacctattcctttccccagaacgctctgatattcctctcaattcctagaacccaaatccaacagccggcatttcccgagccagtattgacagcgttagagaaagtcgcacgagcggaaatagtattcgaaagtgtggatatgtggcgaacgaatggggtacgtagagccaacgtacaggatgctgctgcaaggagtcaatgggggcggatttcgtattgtgtattatttgggactgagcatctggaaatggtggaaacatcaaatatgtaggcttttgttgtacactgggttagttgagattgggattgagttgtatacgggatactgcgtactgagccacgagatatgtcagtgggggcttgtcagaatgttagatgcatggcagtgctctgtggcttgtgaatccagggttagcttagtacatatgcaaatgtaacaaacattctattgtgtggcgcagtcccctgggagagggtatataagggtcccctccccccggatcttcaccttcttttctttcttcttcatacttaccttgtttgggtgactgtgatcaaaaagacagttcaccacaggctggtccctgcattgcacatcgcggcggaacagtctgttcaatggcactcgtgtcattgacaggcgcattctttggcacctccatttatggaatattttcttttcatcaatccttgagccagtggcacgaggttggagaagaggatactgtaattgatgtatcgtagtcgcgtatttgtgttggtatacaactgacgctaagtccttagcctatctaccattgtctttctcgtgaaatattcaaatttgtccccattcccagtccacaaccccagtccgcaatccaagtccccaatccaagtccccaatcccaatccccattcccaatccccatgttgttgaccccgttgaggactctagaccctgagattacctcttcccaacacgtcatgtggtgctacgttttttttctcttttttttttacatcgagctgacattcattgtaagttttcagctattgttaacaagctctatcatacaaagtgtttctgacatgattcatagagggtatgataatatccgacgatgatcgccggtctagacaatgacaaaacgccttattgtttttaatctccaacatgatactatgtgatcctaaaagttgttccaaatccccccaaaacgccagccagctcatattacaacgcgagatttttctccttcagatagagctccttgagagtgctcagctgagtcacagccattgtctctcgcccgagcttacggggcagatcgactataatatagtgcatgagggctagtccatactgtccgaagaagcctagaatcctctcgcctgatgatcgaaggagtgctgccaggagagcaacctgggtttcctgtaactctggaggtggaattgccaaaatcttgtggatagtggcccagaacatcgtgttagggaaggggttccggcgtggagacttcgcgaaatttcgaagcgtcatggcagcatatcccgcacccagagcggtcatgcggtccatgtgaatttgttcactaacccatgaaccagtgtctggtgaacgccaccaacccaggacacggcgtccgccctcggtcttgtcgttgcctgtaaatccccacagggctgggcagatgacacggtatttggcccacatgatgtcggacatgtggagccctttatacgtgaatatatcgaacgagaatatctgagcagcaatgatgccgatcggctcagcgtgggattgcttgatagaggcttcggctagaagagaggatatcaagctctttgcgaggatgttcaatccgtagattagcattgccggtactttgttctcggacttggcaatctcctcaggtgggaatgcgaagaaattccggatatccactgttggctccgggtaggcgagagctttttcaagctcagtcttgagctgaataatctgcgtttcgttcaaataatcaatacccaaacaaccattcggcgagtgtggggggattcgtacctgctgcttatttgcaccggttccagctcgaagctgaccgacagatttcttgatcgagcgtcgtaagttgcccatagtcgccttaaggttagattggctttggcccatgtccttcagccattttcgcatgtccttgagagtcttatgcagctccacgtaacgtttctgcactcggatatcttcagccgaaaggttcccaccaccgattttctgctgctgttgactgtaggcctttaggtcggcctgttcctgcacctttcgggcgtcctcatcttgcttgagcttctgtgcgtcggcctcttctcgttccttgcggagtttttcctcgttcgcggctttgcgtgcggtttcaagggcagcggctttcttatccgcctcctcctgtgccttcttctcggcctgctctttggcttggcgttcggcctcgacgcgcgcggccgcttctcgttcgcggcgtgctttttcagtcttctcacgttcgatgcgctcttgttccttccggatcgcttcttccttctgcagacgctcttcctcttcggcgaggaggtgatccttcaaggttgtctccgcttcctcgcggacgcggtcgtggaaggcggcggcctggtcgagggcagctgtatggactgcttcacgctcgcggtcgatccggtcgagattttcataaaacgttttgcgctcatactcgtggactttcttcagatcggcgtcaaagattttgacttgctcaagatcgcggacgaggtccagcataagctgcttggacgggctgtccagtggtgggacatgattccgaaatcgcgtcattgtaggggtcgacatttgagtaaatgatttatttatgtgttccaaaaattcctggtggaaggagtggtgaatgttttgcggagaggttatgaaggttcggaggagtagcgacgggaacgtgtgatcaagtgaatatggaggtttcaagtgactgggatcatatccgtagctcgaagagtagagttcagaagtgccgagaatagaacaatatctcaaaatatcccaagctggtatcaatctgaatttgaaggtagagagggaacggcacagcgtgagagcaattggacgaggggttctgaggaaatgcgacgaaggacgaaagtaaattgcgcgtgtagcgaaatattcgacgttgtcgcgtcaaaactagtagaaaggagggtccatggagatcggagctatgtgaaggttgggattagcatgtaccattcgaggggccacaaacaaaatcaagcgtttggctgcattgcataaccatccaataataagcgactcgacgattcaacgtacatcgatgcacctgcttcaatatttcctcaaccgtttagagccttatgaagccaaaggaaataaattacctgtaaagttcaatcttacctccaaggttctactttcaccgctttctatcaccgccttgctatatcggtactttcggaatatcaggctattaaacaggcttgccctagtagttaggaagattaagatacataactacgaagtacagcaaaaagtgatatcaatctgatttgaatctcaattactcacatcaatcaacctatctcctactatttactgccagtctattttgcagccaaagagggccttctagacccccaagacaaatgagtacataagcaagacccgcgagccggttcggttccctggcgcgctcccgcctggaaacgttgacgtttacatcatcgtgagcatcatccattttgacctacactatataattgggagaagggaatacgaggtgttccatgtttctccgatgatatgtaccggacttgagcttgctaccctttctttgggctatgctgaataattagctcagcggatactgttcccatacccttaaaaagaccctagactagccaactcaccactagctgtctatatttgaatccatgtacggattcctagggaagagtccatgtttccgatttgcagactagacacccctatttacttataggctcccattaccatactagatactctaagtaggtcctcaaagcatttcaacggatgcatcaggatgatgataactggtagcaatgatcatccacggctgatgaagcggagtatgacggataactgttagggtatttacacgatccacttcggggttattgcgctaaacgctgtaataaaacgtggtttggtcatttccgaacacgccttctgctttccgtaccaatggccctctccccacacctctttgtatctccagcatcacctttcctcttctcctttcccccccctcctctctcttcttatcccatccctctcttcttccccccatatcactccttcgagtcgaattagtcgatggtttcatcgtctattctatccttccctataatttcagtacttactgtcattctcttcgaggatcagctctgaattcccgttttagaactttggaatcatcccggagacaagctcgttctaacggctttcttcgcttaaggccaacctcaatcctccgtcgaggtgctttttgtctgaattccctttttgtcggttgcagtcgtgctttccagcacagctccatcccctcggtccttccaactcctgttcgaagcttcatcccgttgctaccgtgttgctcgatccaagtttgccctgaacgtgcaattgcctcgactcctacttaacatcatccggttgcccctcgtcgcctcttggacttgtaaagaagaaaaaaacgatcatcccacattgagctctacagacgtcattttggaatgctagggttcggaggtcgtcattagtttcatcttgcaggtaagaagaatcgggatatactccacgcatttactttggaagtttcacccggcgtcgattgcccttgccgctttttcattgttagttgtgaggtcatcgtcgagtccgcttctttcccccctgagatggaagcttccattgggtccgcccttacctcgggacttgtactgttgatattcgctctgacattgccttgtccccctcttcttgctttctctcgttgcttctgtcatcttgcacccttactgatccgctctttgttactcttccaggataattcacgtattgaaaccaacaatccgcacatacaaacttcttttggtcggcccgtgatccatctcacttggctcatttgccttttggcgcagtaccagtctctcctgtcgccggattcaccccgcccaatacacacattacattctacagtaattgccagcttctgtcatttgggatcatggatcaacagagtcaatctgggcctcaaggccccggtggccgcaagttccatattgctcatcggagaagtccatctgagctcaccccgttgatgagtatgtgaccgctctcgtgaccgcttactatataaccattcgtcccatcatatcagctaacttgagcttgtctacagtggaacaactggccatccaacaacagatcgagttgctccagcagcagcagcaacaaattgctgcgacacatcaacaatacgttaacatggggctgttgcagccccagcaactaggccaggtgccctcgtttcaacccggtgcctccatgggcggtgtctccccacagcaagtgaatgcattccaattcccacaggggggacagcagcagcagcttggagtaccaatgaacgtaccgaaccagcattcgcaccgtcgcaaccagtctgctctccctggtcttcccatgggcccacctcctgccccgtcttccggagcgtcgggatacgccgattataaccagcagggccaaaacaacaataaccacaagaatgagaacgccggtcgcggtcgtggaggccctcccggcggtggtcaccagcgccgccactcgcttgctcttcctgaggccaagaaagccgccgagctggcccagcagaagagaacagcttcgggattccagttcccagctcctgctcctggtgcaggtagttctgataaccagtcttcatcggatgacaagcctgtatccacttccccggccccccagggacccgccttccagcgggccggaaatatgcgagctggtggccatggccgcagccaatcgatggccatcggtggtaaccgggctgccatttccggtcgcggtgcaggcgggttccaattcccccaggccagtgagccagtaaccaatcaatctgataatcaacgacgacccagccagaacggcggccatgcccggtcatcctcgcgaaacttcgagggtaactggcgccagcccaacaaccaaaatcagagccaggatcagcagagacccatcggtcagcagcagggtggattccagcccggtcaccgctcgcgcggctcgatgaaccagtccatgggctctattggtcaattccagtatggcggccagccccagcttggccagcctcagcttatccaacttcctcagggccaagtcatgatggcacctcagatgttcggtaatcagcaactgaaccccctccagctggctcagctccaagcgcttcagcagaacgcccaaagtatgggtggtctccaggcgagccagcatgccccgccgcagatgtctgttcaacagcagcagcaacagcagcggaagactcttttcactccttacctcccccaggcaaacctgcctgcactccttagcaatggacaattggtcgctggtgttttgcgcgtcaacaaaaagaatcgttccgacgcttatgtgaccaccgacgatctggatgccgacatcttcatttgcggtagcaaagatcggaaccgcgcccttgagggtgactatgtcgcaatcgagcttctcgatgtcgacgaggtgtggggtcagaagaaagaaaaggaagaaaagaagaagcgcaaggatatcaccgacgcccggtctaacagtactgctggaaatgataagcttggtcgctctgattctgccggcgatagacaggaaattggcccggatggaagcatccgtcgccgtggtagtcttcgccagcgtccgacccagaagaagaatgacgatgtcgaggtcgagggtcagagccttcttctttgtgaggaggacgagatcagcgacgagcagaagcctttgtacgccggtcatgttgttgcggtcattgagcgtgttgcgggccagatgttctcaggaaccctaggtctcttgcgtcccagcagccaggctacaaaggagaagcaggaggccgagcggcaagccagagatggcgctcatggccgttcccacaatgatcgtcaccaggataagccaaagattgtctggtttaagcctactgacaagcgtgttccacttattgccatccccacagagcaagcacctcgggacttcgttgagaagcaccaggattacgccaaccgaatctttgttgcttctatcaagaggtggcctattacctctctgcaccccttcggtactctcgttgagcagcttggggagatgggtgacttgcgggttgagacagatgccctgctccgcgacaacaacttcggttcggatgatttctccgatgctgtgctgaagagcatcggctgggaggactggtccgtctctagcgagggagacgcccttgcttcgcgacgtgacttccgtgaagagaccatctttacgattgaccccgccgacagcaagtccctcgaggatgcgttccatgtgaagagccttgccgatggcaaggtcgagatcggtgttcacgtggccgatattgctcacttcgtcaagggtaattccctagtagaccgtgaggccaagaagcgtgggactgcagtctatctagtcgatcggatcatgaacatgctgcctacccgtgtttccactgaactttgttccctcgtccctggcgaagatcgcctcacggtcagtgtggtcttcaaggccaaccccaccactggtgtggtggatgaggatgtctggatcggcaagggtgtcatcaagagtgctggccgtcttgactacgaccaagtcaatgcacttgttcaggacaagtctgatgtcaataccagtggcatctctgccgacagcatccgcttgttgcatgtaagttttttctgattctaccattcttcttattttcccccatgctaatagtaacactcagaacattgtcgccaagttccgcgaagcccgcttcggtaaccgcgtatcaaacgttcctgtgcagcgtctgcttcagcagctcgatgacgagaatgtgccagtcgaatacaatattttcgagtcaactccagcacacgaacttgttgaggagctgagccaccaggccaacttctttgttgctcgtaagcttgtcagcgctatgccggagagagctttcttgcgtcgtcagttctcgcccaactctcgtcgccttactttgtttgttgagcggatgaatcgccttggcttcgaaatggattcaagcagcagtggcagcctccagagctctctctgcaaggtcgaagatgtggatcttcgaaaggtaagcacattttctgttctcccagtcataaatacatattaacacgtgatacagggtatggagactctcattgccaaggccatgcagcgtgccaagtactatgtcagcaatggtgctcccgatgagatgcgccagcactacatgctcaatgtaccggtttacacccacttcaccaacccctctcggcgctacgccgatatccttgtgcatcgtcaactcgaggctgtgctctccgggggtgccgtggagttcaatgacgatattgagtcactgaacaagactgcggatctttgcaacaacaagaaggactcggctctcaatgcccaagagcagagtgtgcacattgaggcgtgccgtaaaatggaccgcaaaagtcgggagattggcggtgatcttatcagcgagggcattgtactctgcgtctacgagtctgccttcgacgtccttattccggaatatggcttcgaaaagcgtgtgcactgcgaccagctgccgctcaagaaggctgaataccgcaaggacagtcgcgtactcgagctgtactgggagaagggtgttccctcgtccgcatatattcccgaggacgagcgtcccaagcccggcaactcccgcgctgctcaagccgcagcggctgcccgcgatgctgaagccgctagagagcgggccagagagcgtgatgaggccatgcgtaagcaaactgagaccggcacaatgtctgcggacgacgtcgatgcccttttcgatgacgacgaagatgcggatgaggtgactgaaatgacagccggtgtgtcgctcaactctgccgatcgctcgactcagagcatgccgccatcgcctacacgtaacggccaccaccagcaggcacctcaccgtactcgctcggatcccaagattgcctccggaactggtgatgcacccgagaacaaattgaccaacaaagagaagtacttgaacctgttcaagctgcgcgaggtggatggagagttcatccaggatgtcacagagatgacccgtgttcccatcatcttgaagactgacctgagcaagagtcctccgtaagtgttcccattcagcttttttctttttctagcatgggcgtccctaactaacttatttctattccagatgcctcactgttcgatctgtcaacccctacgccctgtagaggtctgaacgcggctcttttttcttcatgggatatatttcttgcatgccaccctgcagattcttcgctcaagcgaaggatgctgtgtttcgtgcacgcctacggacataatccaatcccgacgcggatcgaacatatcattatcggcatatctttccttggtcttttctcggcggtttcatccaattatcccaaattctacccatcatctttctgacgtgtcctgggattcttataattatcctgttatatgtgcaaagcggttgtttgtctttttttgagcattttagttgagactgggcaaatccgttagtgccagaccttgcctggttttctttgttctcgttctctgagaatgtttaggaacttagcaggaaggacatcacagctcgatagtctcggaaaacctttccattaatctatggtattacaaactcataaccatcatcctgggctcttcttctgcgtacaatttagtctttgttataaagttgcctatgacttccaaggttgatttgcggtaagcctactgatatggtgatgaaaatatcgaaaagattgatccatggatgtcatgtgaattattgaacaaactcctaaacaaaaaaatcagacgaatatgttgtccaagccaaggcaaattgtaaagcccagggccaccttgcccagcctgatattgccaatgcaatgtaatggaaccagctccataaagttcttctcgctccttgctccatgcagtttgtaagtccgattgaattcagaccatcaagggtatcaagaaatgtcgctaacggggtaggtagatagagggagaacaaaaataaagaatcaactcaaaacaaatccaaagtagagttatcgagatgaatcggaggtctcaaagcaacgcaagaagaatccaccaatgtcaaatcaagttccagttcaggaaaatggatggatttcttatagccgacggataccaatgcgcggctttgttctgacggcaaggcgcctgtgtgtgccgctcgtggcttttttcttggagattccagaagaggaggaccctgagagagatgacgacgatgatgatagtgacggcgtaggtagttgggcatgtgctagagaaaggggagtagagccattgggcgtcttcatggggtgatattcacgcttctctttcagcccacgcgcagttgcagatccacggttttcttttccatccccgctcagcctgcgtagagggtctggcatggccaattggggcaaatcttcgaatattggcacctcatcgcggagacggccggaggcgttgactcccccacagagcatggagagcttgggtgttttccggagtggtgatgaagtacgggaacgtgtgtttgcagtgatgtttcgttcgttggagctcatggcgggggcatcgttgtcgttgtccgagtctatgagcatcatgtctgcatcggagtcttccgggtagggaattgagaggacggagagggggcgttttcccagagcggttttacggggacttgggggcgcaaagtagacaggcgaaggggaaagagttgggttgttttctttgcttgcggtagcggggtcgtcgctgtcgctgtcgctcgtggcgttgtctgttatgggtggtgagggttgggcaaaaggatttgaggaggattgtggagaatatgaggactgtgacgggttttcaaatgcagtggtgttgcgcgtggttttcttcgttgcagctgtgtgggtacgggcgtgtttccgccggcgttgaatgattgcgtcttcttctttctcttcaagtgtggtgcctgcctcctcgccccggagctttgcttctgtcactgcagctttgaggttgagtgggatcggggcgtgaattgaggtcatgagcttggcttggtgtgcaaaggcggcatagttctcctgcataagagcgcctgcggaagcgttgagggcagagtcagggttagggtagataagcagacatgagattgtctgaatagagataaggttagttatctggagaaattcattctactgatgcagttcaacttacgaccaatacatcgcgcagagttagattaggctgccaatcccgcttgagcgtatctacacagacagctccggtgagctcctccatgttcgggtgccatattttcgtcttgaaggtggcctttggggggctcttgggatagtcatcaggcatcttgagatggagctcccataaaccttgtgaaaagggtgtgcccgcggggcccgtgaggagtatgttcagttgtgacaggtcatcaccatccgacggctgcaagtagtacggcggaatatcgcggtgtaaggcagcatggtcggcagctagccggcgcaagttcgacggctaggtatccatgtcagatatagagtacgagcatacaccggttgctgggaaaccagtgtgtcaatggttgaacagggacaacttaccatgctggagctttggatggtttgtggggtattaagatacagggtaacttaagttggagaagaatgcaaattcagaaagtgatccggaccagtgaaagcacaaggatcacaatcacaatgataagagatggttacttcgtcgacggtttgttttgagtggaggtcacactaaccttttcggtagcgcgtcagtcacgtgatgattgtcgcgtaatgtgcgcgtaactaatattacccttttgggattgccctatgttccaccacgtccttactatagcccttgctatctgacgagacatatatcagaagttaggaataaaggggtaaggttatgagggtgatatctcctttatttcttcctttgaagcactctcatcaaagccccgcatgatcgatggatatctcagatccatagaggcaatcatggcaaacaggctggcaaatgtctaccgactgataaaacatacaggagttatgaagccaaaaagcgttgtatgtactcgttaatacgactgacttagtatgttgtagcttgtcatacgcaatgaagatttttgttactgcaaatataagccagcgagctgttgttgaccttatcaaacctacaggtatgatctctagacttaatacacatgatcacacaaggaatcaaaactcttatttacccaggaatgcattaagtttatcacaaatatagtaaaaagaagtgggaaacagctgcgccgtgaatatgcgcctccgagtacaacgcggtgaaacacacgagtcctacccaatgagaaagaattacaggttccatagaaaacctggaaagataataacaaaccgccaaagaaaaataatcgattttcgcatgttcatgatcctcattgctgttgatccagagactggaacaacatggccgaccgacgaccacgaccaaatcctcgcctaattgagcttgatgtggacatcatagtaaaacagaagacggggtattgccagtggccaaatcacagactcttggttcgcttacaagaaagcaacgagggcagcaccggcaaccatgagaccgacagggccggcggtggcaatagcagcagcaccggtagaggaagcagtagcgctagcacttgcactggaagcactagcactggcgctggaagcattggcactggcgctggaagcgttagcctccgcgctagtagcactggcaccagcgctggaggcactagcatccgcgctggaagcattggaatctgcgctggaagctttagcagacaagctggaagagctggaagaatccgccgcggcgtccgaggaagtgctagtggaggtaacagtggccttggactctgtgacgaaggtagtggtgccagtaccagtgccggtggtgacagtggtttgagtggctccggggccggcgacgggcgaggtcagaccggcagggatggaggcggcggcctcctgtgaggtctcggcagcggcctggctggtgataacactgggttgggaagtgacaacactaggttggccggtcacgacgccgagagagtttgtctgggtcaggtagtcaacagtctgttaaataggttagcttatttcattcgggcattgtgatctgtttttttgtttccgcttacctcggtggtgacactgctctgggcgttggccagggcgatggccgagagggtggtgaagacgatggagaaacgcattttgatggattagagattattggtagatgaaatgatgtatgcgtagtgagtatggagaatgttgagggagagaaataaatgtgatcttagacaaaggctggggggaggtgggattataaggctggggttgtcccgggaaacaagtcgcatgttatagactgtttagtgcacacacatgttagaccccgaaatggcttttgaaatggatacctccagtcagccatcgccgtctgaatctagcgcaatttgagatctgcaaggtcttacagttctatttatgtcgatctctggggtcacaccaatccgtaagctcccccacgttcatttattacatgtatgtatttgagggtggagttatgagagacattcacctttacaatggtactggcatggataattaacagcaaatcactatgaaatgtgtctctctgtctcttgaaatcaaggtagaataataatagtgggaatagttggcagatttgacatggtggcaatatgcaccaggcctagctaatttagtgtcggatcacctgtacggtaagtaatcataacaaacatagccttggcgataataacgacatgtctcaatctcagccgagttaattattcagtagcgtggaagcttacttgccatggaagttaggagagacatatcattgactgtgtggacatacgagtccggtcagttcttgattgcggagcgaagcgaagcgattattctcccatctgactcactatacatagtagactaaacatactgtactccgtacagagtattaatatttttggggcttcaaatggcgcgattctattttggagctaaggagctcgaaccagccttctaagtgagacatcactttatcgaaacaggtatcccgaggtcagctctctatcctttcttctactatacacttggcattacggtatcactaaattatccttgtatgctgtaaggatataaccagttttgaggtctaatttatggattctacccacgtagtaattattccgtacactaattatctcgactttaggacttttgcctcacaaccagcccgcggactcttcaaatcaccagactaaggtgggtctttgagacaagtcagcggctcggttaaacccatccagtagggatctgtatatttatatcttttttctcttttgacaggaacaataacagattcctgcaatatcaacggggacaaagagggtcggcatatgctcccatcgtgcatggggtttaagcttgatcccagagcactgcagacggtctttattctggctaggtggataggtagtactattgacgtgcatattgtgtgactaggtcgtaccatatgtctacaatatagaagacaatacgggtataccttggtctcgacttgccttctactcatcaccagatgattctctagttataccgggccaagcatccgactctggaataaggttgcttttggctaccgtataggcgacatcaaaccccttgcttattgccctagtcacgccaatattagtggaggccatgctgtcagttgatggcctagactatgcatcgccatcctacagcggtgtggcgcgggaatgcgaaccgagtgcgccaaaagcgtctatatctggcaatgatcccacttacccaggtcacaagcagccgggcaggcgtactagtagtggaatgtttgtgcgacctctcggtcgcctctagagtacggagtatatcacacgaagatgcaagttgccacccctgcatcgccggcacatgccatacgttattctccaacttgccaagagcacaaagccattggttccaaatatcgtagccagcaacaagctgaagatctcaattgaagactgaactccctcgccgcaatgcatattatacagctctcccccactgcagcacataatcggaaactcaatattcaaccatcactccttgatcgacacatcctgaccgcggacccagtccgcaaactcctttcgcttggcctatgttatccaaatgttagcttcgaatattccaggcccgaaacaatgctgtccagcaacaaattcatatcttgaatgaatccaaatccagtagttccaaggcatgtatccaagtagatccaaaaactcacccgaatatcccagaatccgtaacgctcctccagactcaggtacgggttgcgcgctccgccgttccgttcaatctcgcccgcccactcgcgccagctaatcggcttcaacttctgcgcgctcaagaccagtccgattgaaacaattaataccgaaacgagggtttcgatgatgatgtcttgtgggagggcagtggacgtgaggctgctgtaaaggacagtatgttcgtgggccgagtagcctctgcagaagggtttgttagctttgctcaaggagtgtatataattgctgagtggatggtcggagaacgtacgcatgaactatcaggacgaggccgaagaaagtcaccacgcgggagaggaagctcatgatgggtggtgagtttggttttgcgttgcgggttggaggtcagtggttgagcccagttgctgtgaactcttcttatcgatggataattccagataaataccactgtattattggtgttgagatgaagcctggggtgactggctgtagacagtgttgtgatgccgttttgatacgttggcgttggcgggaggttcgtggaggcccgctccaggtggtttacctaatcaacttttgactccaagtggctcggatttatcatatctgttgcatttttcatactgctattgaagatgtttaatggatcggggtcttctctggttaataaggaggtgtatctccctcactacctacatatgcagtgaacgttgtattcattccttgcgatatcaacccgaaactagacctcgggacaaccctatcaaaacagacatactagactcaattgatgaaataaaccggtgtatttggctgaagctcaggcctattcccttatatgtttcctttcggttaattctgcaatgcatgggcaacacttactagaccagccctgaacgagggtaacactattcgactctgctgtccaatctctgtggttgacaaaggactttgctttgtctcgaacctccgttggtggtagccatacagatagaaaatatggtttacaagagagaggggaaacacgtagttagaccttgtaggctttgccggtctggaactagaaatatgaggattgaggctctctgaattacacggtccatgctatccacggtataattagctgtcaatagaataagccgtgagacagaacataaggagcatattccccatgtatccatcttttagttttctataggaatctgctatgggtggtgggaatatatatcgagatatcatctattacataccatttgaattagatagccaatcatgtctgttcagacgtgctttcaaatcattataaagcttgcctttatcaacacagaagacataaatacatgtaggagtcctcgtctttctaacgtggcagttgtccataagaaaagaataaggagacagcgacgtcaaagaaaaacaagtagttagttaattgaccaagttaggtgaatgtgatcgagtccatgagaatattgatcggttagaagctatatatatcttgagggttgatttgtgagacatcgagtgcataaaaagccgagcagttaccacccctgtaaatagggattctggggacttgatttgaacaattactgtctgacaatcatacacctataaatagcaagttacagtgaaactgtgaatggtcatgaattttttgaatttttcatcaatgactggtcactatggaccagctttctagttggactaggttcgtaaaggattcctttgacatcacgcatttccgtcacacaattcctgcttcataaatgggcatcgcaaatttacagcttctgcatggcagcgatatcggtggactggacgtggtcctcatcctcctcaatcttctgctggagctcatcggtggagaccttatcgtcctcaacgacaaggttgatctggagcttcctgataccgaagccgacgggaacccacttggaggcaccccagacgaggccgtcctgttcaatggcgcggacgttggcctccatctcctcaaggttggtctcatcatctggaaatgtttgttagcacttgaactggaaaagacttgaaaaatacataccccaaggcttgacctccatggtaacgatagacttggcggcgggcttgactttgccggccttcttggccttgtattcttcgagacgcttgttgcgctcagcaacgacctcggggtcctcctcctcagagtcggagccgaagagatcctcatcgtcatcctcctcctcgggcttgtccttggggttggagggaagagtggtggtctcgggaccgtagacagtgaaagctgcgttggagtcaccggggagggtggggaattcgggctcgaaagaggcaatgtgcttgtgccagcgggcaacgttggggtacttggcagcgtcaggagcggcggggaaggccttgaaggtcacgacatcggcctggctgggcgcgtggctgatgaacagagtcagcattgatgttcacatcaaatgaaacgattcaataatgtagcatagtaaagcaggatcagaggtgcgattgctcgcgattggttgtagtcatccagcggggtcttaatccgcctcctaaacacggaccaatgtttctcatcatgaaagcataacaggaaaggaaagagaggagaaaaaaggcagcgaaaatggaaggaattcatacccaacaatgtaggaccgagtggacaggaagtggtcggccactgaggggcacagtcagtcaccaattgattcgaaataacaaaatctcaggggcgcctacgagtcaggccggcatcagagacaaagtcggtgaaacccattgtgaagagaggtgtgttggtatctggaaggagaagaaaaaaaggagaggaaaatagatgaaggaggggttaaaaaggaagggattttttttgttacggaaaatctcttacggagtcacggaaaaacgtgaaagagcgaagactggtcaggtgacttacttgcgacagtgcttacctacacaagtcatgtgaccaactggtgacttcaggacgaagcttagactagtcaggtgactgactggtgacggaggtctggttccttccgccactcagcgtgtactatgtggatcgttcgagaagcctcccgatggaccttggttatcggtatttaaggtataacagtgacatgtccgatcctgaactaccctaggtttctttttacacttttttttttggcaaatctataatattcattatggcggcgagattatccctcaatgcccgcagtcggcttctgcgaacgcctcgcctatcttcgacccggcttctatccccaatcccgagatcaagcatactaccctgcacctctatcataccaccagccatcaaccatagccctatatctgtccgcaactatgccaacgggggccgtccacaccctccaggcggtactcaccgtatggatatgagcggcggagaggacgagaaatcagcactagaaaagtatggtgttgagcttacggagaaagctaaagctggcaagctggatccagtcattggacgggatgccgagattcatcgaaccatccaaattctgtccaggcgaactaagaacaaccccgtactgatcggttccgctggaaccggtaagaccgccgttctcgaagggctggctcagcgtatcgtacaaggagatgtccccgagagcatcaaaaacaaacgggttgtctcattggacctgggctctctaattgcaggagccaagttccggggtgacttcgaggagcgtctgaaagccgtcctgaaggaagtggaggatgcagaaggcggggtgatcctcttcattgacgagcttcacaccttgctgggacttggcaaggctgagggcagcattgatgctagtaatctcctcaagcctgctttgtcgcgaggcgagcttcaatgctgtggtgccactactctcaatgaatatcgattgattgaaaaagatgtggctcttgcccgacggttccagcctattctggtgagtgagccgtcggttgcctcgactatttccattctacggggcatcaagaacaaatacgaagtacatcatggtgtcagaattacagatggcgctttagtagctgcagccacttacagtaatcgctacatcaccgatcgattcctgcccgacaaagcgattgatcttgtcgatgaagctgcatcggctcttcgcttgcaacaggagtcgaaacccgactcgattcgggaacttgaacgtgacattactaccatccaaattgagcttgagtctcttcgcaaggaaaccgatgttgccagccgcgaacggcgagagaagcttcaagaagacctgaagaccaagcaagcggaggccagtaaattgaccgaggcctgggaagaggagaaggccgaaattgataccatcaaacgcaccaaggagaatttagaacgcgctcggtttgaacttgaacaagctcaacgcgaaggaaactttgccaaggctggagaattgagatactctaccatcccagagctcgaagccaagctacccaaagaaggcgctgaacaggatcctcataatcaaactctgattcacgactcagttactgcagatgacattggaaacgtcgtttctcggaccacaggcatccccgttaacaagctcatggctggagacgtggagaagttgattcatatggaggacactctccgaaaatcagtccgcggacaagatgaagcgctttctgctgtggcaaatgctgtgcggatgcagagagctggtctcagcggagaaaatcgccctatggcctctttcatgttccttggtcccaccggtgttggaaagactgagctctgcaagaagatggccgagttccttttctccacggaaactgcagttttacggtttgacatgagtgaattccaggagaagcacacaatcagtcgactcattggttctcctgccggatatgttggatatgatgatgctggtcagctcaccgaggctgtcagacggaagccttacgctgttctgctatttgatgaattcgagaaggctcatcgtgatatctcagcgctcctgctgcaggtcctcgatgagggcttcctgacagatgcgcaaggccacaaggttgatttccgaaacaccctgattgtgttgacctcgaatcttggagctagtatcctggtcggagcagaccccttgtacccaattaaagatgacgccggtgatgccgagcttccagaaaaggtcaaatcggctgttatggatgtggttcagagcgcatacccacctgagttcatgaaccgaatcgatgaattcatcatcttcagacgcctgtcccaggatgctctccgggacatcgtcgatatcagaatcaaagagcttcaggctagactcgatgaccgccgtatgactctacaggttgacaatgagactaaggactggctgtgcgagaaaggctacgaccccaaatttggtgcccggcctttgaaccgtctcattgctaaggagattggaaaccgcttggctgataagatcatccgaggtgaaattgtctctggtcaaactgcccgagtttctcttgatgagtctaagtctggccttgtggtaactgcggagaccgcggaagaataaatgacaacatgaaatctagcgttcttatgtggcacatacaatgtttttgcatctgctttttttgcgaatatttcgattgcatgtccggtcttctctcatatattatggctttgtacaatagtctattctagacaattcatattcatcaagttgcttattttatgtaggctgtaggctcgaggaacgacccgtggacaggtgactaggccaactcccaccgtttcacatccccatcattttcctctctcatcccatctctaagtatcccaattccgtgggccgcgggaaaatgccttcattaaaaagaaagagaacaccagcttcccggcatccaattacacctcgtacatctgggcgacgactgggccacagggcgccagctagtcaagccttcagcatttcaagtggtcctccccgaacccctatcatttcatcagcaagtcaattgcacacaccttttcctacagataccaagatcgaaataggtgggtcggtaagagctacagatgatgacttcgatgaccatgtcattgctgccatcgacatgaaggatcatggaactgtggggtgctcatactactcagccgaagaagaaaagatgtatctgctaggtgacagtcggtcgggggatatagagacaatcgacgctcgtgggttaattatttgttcaagtctagattagaagtgctaatcaggccatctacagtgcttctccagataaaacctacagtggtcttgacacctccgcgggttgatcttagttcccagaatcaagatccgaaccttgcacaagaagatggtacatttcccttgcactggaacaatttgaccctttccagtgcgggcaaatgctgataatttctgtctagtttcttctgcctaccttccttaccagatagacattcgtccaacttcggagttcagctactccaatgcagaaagcaaacttcttgctttaggggtttcctctgcgcacgaacaaggcctccggtttttcgtgccccaaaatggtcttgccggaccggaagaagtggacccagaagagatgggcttcacactccaagaaggaagactgctgcatatctcaagttccgttgacatggataaccccgtgactattggttgcgcgggagccatactcacttacctgcagcgacgaagagccgcggcacctagccccctcgaagaagggaatgagtatcgggttcgagcactgcagatgttcaatctacgggatacgatgtggatcaacagcaatactttcacctctctccagattatccagtcggagtcacacccgaatatgttcaaccagggacctgggaaaaagtctgcttcaggcaaagagggtctttcggtctatgggctcttccaacactttgcatacacgcctcagggtagggcaagactcaagcagacatttttccgtccaagcgtgaatctagatgcgattcgtgaacgacacgatttcataggactattctcccgccctgacaatcttgcttcgttggagaagatgaccaaagcattgaaacacattaaaaacatcagacctatcatgctcaatcttcgcaagggaattagtactggcagtgctaaggttactgggttcaaaactacggtttgggctactcttcttgctgtatgtttgatttgccatcatttgtctatgtagagtgatagttcttcattgcgatactaatgaggcgactgaccagtttgcgttctacgctatcgacatcaatgatgcactgcgggagacctcgggcgcgcacatcctgactgtccgaagcaaggttaatctccaataggtatcccagtccttcttgtattgacaacttgcaggctctcagggtctttgaagcagcccagctgtacagagttggtcgtatgattcaagaaattgtaagttccctttttaatagaattaataacgcatctgactttttaggtcgacattgataactccgaagaacaaggaagaacggtggtgaagcaaggaattgatagagagcttgacagaattaaagacagatacgatggtctcaacagccttctcaagcacgttgctctcgacattgccgcaacgattccggcgactctcgacgtcgacgtcaatgtcatttactttcctcagcttgggttccatgttgccattccactcaatgagcatggtgctgcggcgtatactagtgctgatgatgaatgggaattaatgttcatcacggaaaatcgggcgtatttcaaagacttccgcatgagagagatggatcagaagttgggagatatatacggtattatctgtggtaagcctgctaaattaatgggaagcaatggggatgaaaagctaaaaaaaaaaccctaccttgacagagaaggaaatcgagattgtatacgacttagcgcagagggttcttcgatatgagaatgtgctcgtcgatgcctctgatatttgtggagagattgataggttagtctttgtgggacatgatgtgaggtccgctgatacaaatttcacagccttcttgctctcacacagggagcaagcttctataatctgaccagaccacgaatcgttgaacaaaatgtgctcagaatcaagggtggccggtaagagctcttcaacgatcatccctcgacatctctgacagatgataggcacattcttcaagaattgaccgttccgtcctatgtgccaaatgacacattgctgatgggcggaaatgagtccgagaccaatgacgctgtttcatccataaattccaatcccagcatgttgctcttgactggaccgaattactcaggaaaaagtatctatatgaagcaggtaagctgaattttgtctttgtgaaacacattttctgacctactattaggtcgctctgattgtctacctagcccagattgggaggtatgttcctttctattaagataataatacaaaggctaactggcacagctttgtccccgcagacagcgcggaattggggattacagacaaaatcttgactaagatcaatactcaagagagtgtctccaaggtatctcaaatcctttgtataaagtgtcggattgggcaacctaacatgtctcaaggccgaaagcacatttatgaacgatttgcagcaaatctccctctgcctgaaacaagttacgaaccgaagcttgctcatcatcgatgagttcgggacgggaactaccgaaagcagtccgttcctatctagccatagcttttcgttcagactaattaacgcgtttagatggcatcggccttgcctgtggcatactcgattatctactgtgcctcgagaggccccctaaagtcattgcagcaactcattttcatgagattttcgagaacaacttcctcgctttgcggcctcgactctatcttggctatatggaagttcaagtttgcgaagaaacccaggcagccgaggaccagattacatatctgtataagtatgtacaggaatgctggctcctgggtcaatggtatgtaaatgatgcttacagttcgaacagttttcgtccggggcgaagtagccagagctttggtaccatgtacgtcctgcttcttatcatgtccgcattcctttcgaatcgattgacttcaatattggtataggtgcgcggcaatgaacggtatcgacccatctgttatatctcgcgcaaatgagtttacgtctctttccgcacgaggggagaacattattgtggcctgttcggttctatcttcagaggagatgcaagacctagaagaagcggtacgagttaacttttttataaaagaaaaatggaatgtgactaacaacctcgatacaagaactccctagtgagacattttctggagattgatttctcacaaggtgactcagaccatgtcaaggccgtcttcgaaggcctgttcgagtgaaaggatttattagtatggggccaagcgcatggaggccaatgatatcacgaatatctttacaaagtacaacatatatttacgccctaggtcatcatcaattagctgaacccgcgatgtcgatatattccattaggagaatgaaatccttgcccaccttcactgcattcgtagcaatcggggagatagtagctaggatccctgatggatcaagcacattatatacgtataagagaagatggattgagatgaataaaacggtttttgaaacttcgggtaaaccagaagatgagatcggggttatataactacacatcgaatgcctgaaactgcccgcagtgaacgccatggaaacatacacacaagaccgtggattttatgatcaagcacacattcacagcttaacactcttgaccaggtttttcttgatacccgtaagctcaccaccatatccaccgcggccctcgccgcccttgtacagttgcttagtactgccaagcttcttcttcttttcctcgtacttctttctcttcttaacacgcgggttacgcgagtctttactgcgtttcgcgtgcagacccttgttcttctggatctgatacgtgattgcacgcttgccatctggaccaacctcctcttgcacaaagatttttccaccaaggcgctcagcctcagcgtaggcatctgcacgagcctgcttgtcgtccttgcgcttcttggagcgagatgccaccatgtcgtagtattcatcgtcatcagtgccctccttggcaccctcaccgcggcggagctccttggcgacgcgacgatcctcgtcgtcactgtcaccgcccagctgctggtcggggttgagttctttgcggccgcgcttctcggcttccacattgagacgggcttgacggtcacgcagacgttcgcggtatgggagatcggcgtctccaccagcatctcggcctgctgcgttacgtttgttggctttctgggccagttgcgaggtgtagaaacggagcgagcgcttctgcttggccttctcttctgcctcatgggctgtgagggcatcctcatcaccgaagtcagagtcatcatccttgagaggtgccttgatcttttgtgtcttgcgcttccgtgaaggctcggtggccaaattctcgagatcggcgaggccagcttctgtttggcggagacgctcggcgcgaagagcttcggcttctgcctgtgctatctcggccttgctgagcttcttctgtttcggcttcttgatctcttgggtctttggttgcttctcggtcttggttttctcggtcttagtctccttgataggctccccaacgggttcctcaagctcctcgagatccttgacagtgttccaaagcttccggaatttgacaagcgatcccatgacagggtgttgtcggagttcggcaggggtcatcggaacatgctcgctagtcgcgtcgggagatggggaggaaaggagcatgaaatacatgctgatcgtgccaaggtatgcagacaacgcacggaatttcaccacaggcactggggatggctgtggctcttctgagtcgtcgtctgttgaggaagccttcaaggctgcttgttgaagatctttgaaggagctttgaaggtccacgaagtccttcgctaggggttcaaactcggggtatctcgacttcaaaattttcagcttctcatcggtgtccatatcatcagtgatctccaattgtggaagcacttcagttaccacgccagcgtcggcgccgtcctcggtacccttgccggattccacccattcagactcgtcaaacccgaaatcggcctcattcatagcctgcaactgcttcatttgtagtcgcttggcctcctgctcttcctccaatgcatcaacctcggtctcgatctgatctgcgttataaagatcctttttcgatgaaccccaggcagcaatgccttcttcatcttcctcggattctgcatcacccttctttggctgacccatatcatcatattcgtcgtcttcttctgagtcttcgagatcgtcatcctcgtctatggattcgtagccaaggatttcttcgtctgaaggctggatcaattcctctgtgacaatcagtaagacaccgttcgcacaagctcagtttatcctcaaaggcacataccctcctcggcaactctgcgccgtctcttcgcctctgggccttcctcgagtagaatctggtcgcggccggtttggaagtcatcttccgagtcgtcgaatcgctcttcgatgtcaaacttagagggctcaggagctttgttctccgctggacgaccagcttttctctttttgctgcccatttttgcgtgtataattcaagcgacaatgagccaactcgaagtctggccgataaactgtgataaaattattttttgatccctcaccgccttggctgcgctagcctcgagtggggcgtttgctctgtttgcacctttggaaatcaaaatacgggtaattttacaatcccacaacttttgtaccgtcaaaaacagacatcgggaacgatctcgggtatttccgtatcgttacacaattatttactgccccgtgtgccttccatttcgaggacaactgacagacgcaactgccaatcagccacgatggatcctcacgcgttaattgctcgtcttcatctgcctcaacttctctcctccttacagtccttgtataataatacgtccaccctgatattaggcgtttccacactcttttgcactatcattgtctatactattgccaaaatgtttggttacgggctacgaaatgagttcaatgtcgacgggcaggtatgtgtaagactacatgattaacgcggtacgttctgactaggtatgacagacagtgttaataaccggtggctccgatggtatgggcaaagctgtcgcactcgagctagctgcgaaaggcgcaaacgttgttgtggttgcgcgcactgtctccaagctggtgaccgccgtcgatgagatgaaggtcggacatcccttcataatcagttgatcaatatagctcacctattatccaggccaaagcagcgaatatctttaagcagaaattcctctatatcagcgctgatctctctgatcccgtcgagagtgaaagagtcctcgcagaagtcacaacgtggaattcaggggctgctcccgacattgtttggtgctgtgcgggcttatctcgcccgggattctttgtcgatgtgcccatccaagagcaccggcagcaaatggatgcagtctattggactgcggccaacacagcacatgccaccctgcgccgctggctgaagcccgttgccccgagtgaacagatgagaacaccccggagacatctcatttttacctgttctacccttgcattcgttcctatcgctggctattcgccatactcgcctgccaaggcagccattcgttctctatccgatactctgagccaggaaatcgaaatgtacaacggagcctatacccagcggcaccgcaatgacgccccagctgcggatgtcaggatccacaccattttccccatgggcatcctctcacccggctttgacaacgagcaaaagaccaagcctgaattgaccaagaaactcgaagaagccgacaagccccagacgccattggaggttgcaaagatctctatcagtgccctggagcgcggggagtacctgatcactaccaattttgttggtgccattatgaaaggcactgcctttgggcctagcccgaagaatagcattgtcggtgacaccatgctcagctggctcagcaacctagtattcctccaggtcattccggaccttcgcagcaaggcgttcacttggggaaagcagaacggggttccgaacggtaacagtgctccggcttcatagcgatcgggtgtattcttctagcgactgcttcttgtatgatgataccatgagcgatgtctgcatggcgcctccgaacacctaaacattcttcaattcctttcatcctttgttgcatattctttactgtacagtacaaaataatggcttgtctgttctcgtatttgtagcaattcgaacctttcattgatgtagtcattttccggggcccggactgatgacgtacgatgtagaaacaacaagcttatcgtttatcctgccaccccattttcgacctcgaaatttctttgtccccaattgcactgcccaaactggggtttaaaaagtctttgtttcaaatatgaatggcaactgatcacagatcactatttttggcacaaaaagaaattgctgggaaagcagaaacaaaaccctcgctcctccatcgaaagactcggcgatagcgatagcacaagatacaagcaaaccaccctcgagtctttcaacactgttaacagcaatcgccgcgcaaactcgtgtcaagatggaggctctcttctcaataccggtgctgtccgttttcctcattccggtcctgtcatcctacagcaccagcctgaacctcctgttcttctacatgacttggtcaacactggtactgtcgcattcccggctccgcgtggaactgttcgggacgatcgccgtgcgcgtactcttctacgcactgccgtctattgtcttcttcctctttgacatcctgaccccgtcggctgcgatcctcatcaaggcgcaaggcgcaaccggcttgccaggtgggaggaggcgacgtcgaatccacgcgaaggaattcaagatcgctgggtgggcactattcaatctattcttgggtatcgttgtgcagggaatacttgaaacgatactggttcggacgctcggcaagcgcagtgcgctcaaggtatcactgaagcttcctatgccatttgagatatgtagggatctgagcctggcgatgtttgggcgagaagtgagttattagaattcccagactatgtttctagcttgtgtcttctttggtagtcccatttgctgacattctcattctgcttttgatagctcctcacatatatcattcaccgctacgctcttcactcagggagatctcctatactttccaactggcaccggtcttggtaccattcattggctgctccgttcccattgaccgcgcattacgaccacccggctgtctatctagttaacaagttcatccccacctatgcaccagccatcatcttccgcttccatatgcttacatatcttttgtacctgctgttgatttctgtcgaggagaccttcgcatactctggatatactgtcatgccgacaaacttatttttgggtgggattgcccgtcgcacagatatgcatttgttgatgggtggaaggggcaactatggcccatggggtgttatggattggattatgggtactgttgttggagactcgcaaaccaccgacgatgagagttatgaggcagcagatgagccggatatgcggaaagcgtatgaggctgcgaagcgaaaggctgttgggtctgcgacgaagccaaggcgacgatgagacgaccattgatgagtacatgataaatcattgattggagctgtagctatgtagattttgtcttggttttgctgtttttatttggagtgtaaattgggattgttcaacatatacatgtgtgtctagaactacaatatatattcgaggaagtgagacttttggatgatatgatattctttgaatgctatcatcattcataccaacattggtttcatatgacccccaaatgaatatcattcgagtactatacaatcagtagctacgagggcatggttggcacttaaccctaaaatcgagtggcggatggctgccaagagtgattacacatgggatattagatctagaacacttagaagctcatcgcacatccatattgcattgaactctacggtgatatagccgagcagctattataacatgcatccattgattatctcaaaaggtgtcaagaagatatttatatacttcttactccgtagtccacgcctagatctcgagatctctactctagttccacacaatccggatatccacattcatgacaaggcccagcaaccttatattttagtgtcttacagagattacacgacgcttagatgaatcgaaggaattgcccaattggattgccgcctgaacctggaaatgggagttggtcatactgaacataaaagagaatccagcccgcctgctggaacgaggtgacttttaatcttttttttttttcttgaagtctttcttcataacgcagcttcatgcaaaatcagccacgcgcaaaaggaacgggtttcttgaaacatgagaacgacatcgggttgtccgaagtaaccgcaaatcataagaaaagtgaaaaacgtgttttgacggatcccgtaggaattacatgacatggttcatgaaaccgacccccgaaagtcgcgaaaggatgccgatctgcaatcgagccgcccctcgttggaaaaatggtcctccccaactatctaccgaacccgcggctaccacacatttaccacttcatctcgtggggcttgtcgccgtttcggaggctgaaggtggtagcgaggtagctgccgaggaaatcctccttcttgatggaggcaaggatagcctggtcgatagccttctggtcgctggcgcgagcgctggcaacaaccttcttctgtaaagacaaaaaagtaattagcatttcatcactgcaaatgtgatagtgtagacaagatgcgtacctcagccttctcgccctgcttgaagaaagcctcttcggtcttcttctcagccttcttgtccttggtgaagtatccgggagcggaggtcttctcaatggccttggcgtcaacaccgctgatgtcgacacgcttggaggtggcaatcacgtagcgggagttcacgcgacggagagggacaccgttgatcttgaaaggaccggtgacaaggaggacaccctggtcgagggacttgaggaggatgacacgcttgccacggaaacggccagcgaggaggatcaggatggtgccgggaacgagggtctcgcggaccttggcgggacgcagggtcttgcgaacctgtaaacacacaaagtagttagtctctgatgccacacaaatcctagcgattcccgtgaatccgcaagtatctcccatcgccatagccgcatcctccccagatgatatgcgattcgcacaagatcacaagatttgatgaactgtgtcgtcgattgacaccggtgtctggctggatgtcgccccgtaattcacaaaggctcttcctcagaataccggtgccatcgtcgcaatcatcggggcggatgcgtgccgggtcgtatgtcctcctcttttttgtgccgtcccattttcacagggtgtactgactttcttgggctgcgactgatcgtccacggggtaccacttctgggccttgtcggtgggcacgaccctctggctcttcccgaactgcttcgtctggccgtccgacatgatggctgctggcgaaggatgaatggttgtcggggtggttgttggagatttgagtgaggacttggactgctaagcggagtcggctccagtgcgggaattcgtcgagggttgtgtgtaggaagccctatcacgtgtttaaccgacagccctagccacttttggaaagcggtaacttagcatgctgatgccatatctgtaaggccgcaatatacgggcgactgtaaaaccacttatgcagaagcattgctcgacacaaacaactgacgtataccgctcgcagcctctctctctctttctatactctgtcttaacatcctcccgactcttttttttatctacctggagggagcgaattctgtcaatacagtatcctctattattggatctttgttcagaatcaaattccccaacatgtcgatagctccgatcatcaccttcaaagcaggtatctgcgacctggatgtacgtgagcttagctttccggataccatcatccggatatacccatattacattgcaactttactgacagcttcaatcagatctctagcactcctcccgccgtaaagccgaagccaaccccaggctatgtctacctttactccgaagatgaccttatccacttctgctggcgctcgcgtagcgcctcactagacgagcccgagctcgacctggtgatgatcccttcagatggcagctttactccctacaagccatccggcagggacgctacgaatggccggatatttgtcctgaagttttcatctagctctcagcgatacctgttctggatgcagtcccaatcccagcacgaggacggcgacccaagttggttcagtccccgtgacttgaagcttggagaaattgtcgatgttctgctgcagggcgaggaggttgacgtagagcacgagatcgccaatcttccccgccggccttcgggcggtgatgacgatgagaccatggaggacgtggaaggcaccgatcatgatcgcaaccgataccacagcgcaggtagcggcggcgctggccccgatgcgaccggtggcgacgtgcgtgaggagggacaagagtcgcgagaaggtggtgccgatggtggacgagcgtaggtacatatctccgacagccttgattcgggccatctaagctaatttgccttttgcctcatttgcagagcaactgccgagcaagattccgcgtcggttgtccaggactttttgaagtctctgggcggccgccagagccagagcgaatcccaagatcctgaacgaccatctacgacacttcaagaactccttccgccctcgaccacgttgcaatttattgattctgctgataccactactgccgatcaccttctgagcttcttaccgcccgcactacttctactggcccagggcaacgctgaggcttcggaagctgacacggacccggaacttgcccaagctgctctcctgtccctcgacctctcccagaaaaaagatattctccgaaaagtgcttcgttctccccaattcatgcaaagcttggccagtcttactgtagcccttcgtgatggtgggcttccgagtatcagtgaggctttgcaaatccccgtggctaatggaggctttatgcggagaggtggagtaccccttggtggtggcgatgcggtagacgcgttcctggatggtgttcggcaacacgttaaagaaaaggaatctcagatggatactgattgaatcactatcaatacatttactcggagaagagaagacattcggaaacttttcaaaggtgtagaactatttttggaaaaaagggaaccccactagggagcattgttcaagcaaggctgcgtcagcgtctggttaaaaccgttgtaattttcattccaggagctggaattggaggataagccagctgttatgtaggcagaaaataataaaaatacgatgtacgatgtatatggctcgtatcctgccgcggtatgtcagccacgacaacgttgaatatccatgcgcatgccgggacttgtcaatttttagtgcaattgcgatccgaacgcccttggcccgaattcagctttggaagcctgtctcttcttttgatttgtgttggattcacactctctttatttcctatattatacatattttctcccgtcaacacgtgtcgccaccgtgtcgtgtccgataaacccccccgtccagcctgcgatgtctgcgattcggtaatatccgatcctgcctgacgatggcaccagatagccagaaccttgaaaacgacgaaaacgctccgccgaaccacatccctctccaagatctctcaaaaccggccgatgctcccaacgagcgcgggagaagccgcgcgggaaccggcctcttctcacgacgatcattgatcgggagggggtcgcggagcaattatgagagtgttgcgaaagagtctccaatcgattcggctggaccgagcaggagtccattccaaccgtcgaaaacgagctatacagaggttgcttccccgattgatgacctgggtggtttcgcgcaagcgatgtcatcgattggtctcagttttgatggccctcaatcaagggcatcgccctcgtaccaatcagaaagccgtggctttgacgatgctgcttcggaccttgacgtcgtacctctagacaatttcgatccccacgacccccatggctacaaccccccagcagacgaagatgatacagtacggttgaccgatcctcgatacttacaaccgatgagcggtgctaccagtgtagaagggcgacgcagcactgacaccggtcactccgcgaattttggtggtgcaagactgggcgatgatcttcctcacctggaggatgggatgggaagccgtcgtggcagcactgctcgggctcggtcgcgctctttgtctccatcggcgtctagcggggctctgcaacgcgccagctctatggtcaaatccatgtcgcagcgagtggtcaatctgagtaacgaaccggaagtcgtacagcaaacgattgagaggcaggagcttgataaaaatgcacgaatggatggaccgccagtcttgcccgcgatgacagactatgacaacgaccaacacactcaaccaccccgagagaagcgttcctccagcagattatggagggatcggaacagtccattcaaaggcaggtcacttggaatcctgggaccaaatcatcctctccgactctggctgtgtgatatcctagtaaacccgttcatggagcccttcatcttgattgttattgtcatccagaccatcttgttgacagttgaagatgcgcttcctaattccacgaattcagtgaggtggggaagcagcaagtttgactgggttttcttagccatttttgtcatttatacacttgagataggctctaagattttggtgtctggatttattctcaaccccgtcgagtacagcacactcaatcgcaacctcggcatcaggaaggcaatcgcagagaagggcaggaacctgatcacaccgcatcggcagccaacgatcaagaaaacatctacgctccaggctgagccccaagcttcaatcctgcgaacatttacaggaatgaacggactagaccctgaagtctttgatgatcctctacacaaacgtcgcattaggcttgcccatcgtgcgtttcttcgacactcttttaaccggcttgattttgtagccgtggtcgctttttggatatccttttttctttcaatttctggcgttgagaaatcacaccaactgtacatctttcgcatgttaagctgtctcagaattctacgtctccttgccatgactaacggcacttcggtaagtcttccgttgcgatgatgtggctttcgagatactgaccaattacttctaggtaattcttcgaagtctcaagcgagcagcccctctgcttgtccatgtctcatttcttatcggtttcttttggcttcttttcgccatcattggcatccagagtttcaaatccagtctcaggagaacttgtgtctggattgatcctgcaggccagagcaattacacgttgaatgatccatgggacacattacagttttgtggcgggtatctcaaccagacgggtggagaaatgccatggcttaactccgatggtatggacgcagggtacagccctaaaggatatctttgtcctcaaggttctgtatgcatggaaggcgtcaatccttataaggggactatgagctttgacaacatcctgcactccctggagttggtgtttgtgatcatgagttctaatacatttaccgatctgctatactataccgctgacactgactatctcgctacggctctgttctttgcctgtgggtttgtcattttgagcttgtggttggtgaacttgctggttgcggtcatcactcactcattccaagtgatccgagaagagagcaaacgcagcgcttttgctgtgcaaaaacttgatgctgtcgacgaagacgagacagtgtctcacaaagtcagtcctctaaagcgcatacatgataaaactgagtggatttggatctgcctcatcatattcgaccttatcgtgcaagcactgagaagctcggctatgtctgcccgtcgaacgcgatttattgatactactgagactgttctcactatcattttcctagtcgagattattttgcgattcgtctcggattggcgcatgtttcatcgaaggcgtcgtaacttgacagaccttttgcttgtaatcgttacctgcatcatccagctaccacctatcaggaactcaggtcgcgcatacacagttctcaccttgttccagatccttcgggtctaccgagtggtattggctttctctgtgaccagaaagctgatcgtgattgtgttccgcaatactgtcggtctgctcaacttgatatttttcctattcttgatgacctttttatctgccattttcgctacacagctttttcgaagccagatcccagattcagatccaagtggcacgacgatcatgatcacgttttcgaatatctacaactcatttctgggaatgtatcaaattttgtcgagtgaaaattggaccacgattctttacaatgcaaccgcatacacgaccgacttcaacacagcctggatctcggcagcattcattattctttggttcattgtgtccaactttatcatcttaaacatgttcattgctgtcattcaggaaagcttcgatgtttcagaagacgaaaaacgaatgcatcaggtcagggcttttttggaacagaaacaagtccatggagcaccccaaggaaacttagcactctcgaaaatccttcgcattggccgagattccgcccgttataaagatccactcgaccatggtcctgccgcattggaaatgttgctgaaagacgccgtggtgcaagagttcctcgacgatgaagaaactaggcaacaagaacggcaaaggccgaaggactcccgaagggtgagcacgatgccactaggcgcgactcaagagactgtccaaccaggctggatctcacttctatggacgaaggccaccacacttgttatgcggagggagccaaatcctttctactcgaagctgaagttctcacgtgcttacgaggagttggatccgagaaccatggcaagagaagttgttactgcggcagagcagagaaaacgggaccagcgagcatacctcgtgaaacatcctaattataacaaatcactgtttctttttccgccggataatattgttcggaaattttgtcaacggattgtcggcccaggacgtggcagccaacgagttgagggtgtggatccatacaagccactatggtatgcattctctgctttcatttatgcagccattgttgccatggtgcttctcgcctgcattacaacacccttgtatcagcggcagtatttccgcactgaccgcaactggttcgtctatactgacttgggctttgccgttgtgtttactattgaagcaacgattaaagtgattgccgatggtttcttctggacgccgaatgcatttttccgcagttcctggggatttattgacggagtcgtgttgatcacgttgtgggtcagtgtcggtggctcgctcaaacaggactggagtgtttccagagcaatcggcgcctttaaagcgctaagggcgttgcgtcttttgaacgtcagtgacagcgccaaggacaccttccactctgtcatcattgtcgggggatggaaggtcattgctgctgctgcagtttctatgagtttcctcataccattcgcaatctatggagtcaatctgttcaacgggcagatggccagctgcaatgacggtgggttttctgggaacttgaccaactgcgtcaatgaatattccagctcgccatacaattgggacgtgcttgctccacgagtggcggggaactcttattatgacttcgacaatttcggtgactccctcttcatcctgttccaaattgtctcccaagaaggttggatcagcgtacaagaaactgcaatgagtatcactggaaagatgacccaaccacaagatctagtggcaccggagaacgggcttttcttcgtggtattcaacttacttggcgccgtgtttgttctaaccctgtttgtgtctgtgttcatgcgtaattacacggaacaaactggtgtcgccttcctgaccgccgagcaacgttcctggttggaattgcggaaacttctccgacaggtatcgccctcgaaacgatcttttgatgacgagagcaagaaattgcggctgtggtgttatcgaatttcagttaagaagcatggccggtgggcgtggttcgtgacttgcgcccttgtagttcatctactattacttgtgctggaatactatcccgaacctgcctggtgggagatgcttcgaggtaagtttttggccagactcgaatgttacatgttattaattggtcaatctagccattatattcttggcattcatgcttgtctacgttgtgaatgtcttaatccgactaattggtcttgggtggcatcgatttagccggagttcatgggatctgtactctctcatcgctgtccccggcgctttcatcagctccgtccttgacatttcataccgcgaaagaactcatgtcgtggtggagctcaacaagcttttcctcgtgtctgttgccctgctgcttatcccaaggaacaaccagcttgatcagctttttaagacagcggcagctagtctgtccgtgattggaaatcttctagctacctggttcgttctattcttagtgtttggcattgcgatgaaccaggcgtttggccttaccaagttcggcgaaaatgaggatcacaaccagaatttccgcgatgtgcccaaatccctgatcctgcttttccgagcaagttgcggagaagggtggaatgagttcatggaggactttgcgactatgactccgcccttgtgcacacaaaattccaacttcctcgatgatgactgtggaagtgcgccgtgggcccgtactcttttcattgcatggaacctgatcagcatgtacatctttgtctcgctgtttgtttcattgattttcgaaagtttctcctatgtttatcagcggagcagtggactgtacgcgatcagtcgtgatgagatccgtcggttcaagcaagcgtgggccacgtatgatccagatgggacgggctttatatccacggagcggttccctcgcctactcggtgagctctctggtgtctttgcgatgcgaatctacgagggagagttcacggttggaagtatcctggaaaaatgccgggtcgaccctcagagaaactcgataggttctttcgcaagaaattcgacggtatcgctggttcagccacgacaatcaatgtggccgaactctcgtgtctcgtctggtgtagatctcgacgagctcagtcggatcatatcgcggattccagttcaaagcatccgagagcggcgcagacgattgaatgctttctacgaagaaatccttgtgtcagcagatcccgaccgcggtatttccttccatcagtgcttgatgattctcgcacattacaatgtgattagtgatagtaagagtctgcgcctcgaggaatttctacgtcgtcgggcacggctgcagcgggtggaagaggctgtccgtcgaaacaccgtcgtcggcttctttgataccctatactggtcacgcgaattccgccgcaagattgaccgcaagaaaaacggccggttgagcattgtcccgacattcactgtgccggagatctttgtcgacaatccaggcgacgaccccgaggagcacgaccagccaggttccggtgcaatgactccacggacacaaccagacttggatgcaaacttccctcctatgctctcaccggtctccttgcaccacagacgagcggagtccagcccaactggaaaccgcagtgctctgcctcgcctcaataccaatttgagcgggtcagtatctagctgcagcacacctacgagggagtggtcgagtatcagtccttcaatcacaccgcgtcaaatgtatggggagcacaccccgctcgacaccagcgaaacacacgaggcgccttcggccaccgatacttcgcgtcatgtacaggatgttatgcattctctggacaactccgcctggggtgagagtatccggcgaagctttacacagcggcgatcaggcgatcacagttctgaatgaaatgctgtgcctattgatgtgtctgattttggatgttatcatgaagtgagtggatagagcgtggtttggttttctactcttttttctattctttagcattcccctcgaatagattggggattttgtctatgttttatggcctgtttggcccatttttctgatttttggtgctttatactactctccttagcgtgggagcattttgcatagcagcggcgtgggattccatttcaatatttttccatagacttggatacacgattgattattgcatatcggacattaaaagagacgattattccaactatctatagaagactgcatgggccaaagtgggtcggattggttactattggcgacggaggagggaatcgagaaaaagatgagatatgaccgtatatggctatgaatacatctacttttagataagtacatacctttacatatggagaatacaaaactagcaaaagaagtccagccctaaagccattgtgtatccgtttgcagggacaatcacattcatccgcatgcgttcacccgcgttcaatccgtgtcttaaccctccctgcagcaatagtccttgcagtcaacccgttataggattcagaaaaaaagtaaatacctaggacaattctctattcttcgctctacaaataaccaattcaatcctcgtatcctgctctactatgacatagtccaacaatcaaatcaaaaacttcacaaaagcctcacattccataatataacaaaagcaacaatgcacatcgcctcgccatttctctctttgagcacatctttccgctccagaagccccaaatcaggcagcgacagctcgagcccaagttcaacaacgacctcaccaccctcctctccaacgtccacccactcgccccagagctcaccacaccacctgttcaacctatccttccacacctccaaagcccagcacatattccgagggcaccccgacagtgccaggcacacaaatactagccccggaaattcagcccgcccccgcccggcctccgacggcccacacaattccaacgccgtcagcgtgctcccctgcgcggtcctacgtggccgctcagcgatggttatccgccgacgattgtctaagatcgacctggcgctgagtgaagagcggtcgcgatgtgacgaggacgctattgagcggcaggggttggggctgatggagccccggccggtggatctggggattggggaggtaaagcctaacttcgtgatgggcggcatctttgaggttatggaggggcgggcttaggctttactttgttttctacaatattgttctttctttctttttctttttcttttttttttggtttatgctgtgatactctatttgttttaattgcctttgtatttttcatactagaagttggattgtctgcttccggaaaggaatgtgagatacaagggaatatgtatagtggctcgatattggatatatgttacatattttttggttatatttgagcccttgcggaactagctacccaatattcaatgtctcaaggttgttttgcctaatatcgttcatgtctatgtccctagctaatgcatagtactttctttttaaggttcatccattttatacttctatcaagagtcaaatgcaaaagcgggtaatgccggaccggactagcctgcattctatactccacatctttctccggggaagggctagatcagcctggagaagtgaagcatcaagccccatgcttggccctaatctccggtccgagaaacatagccatagacttccggagaagaccaaattgggggccattttgcgacacttatcttcatttataattcctcccttactaccctccccgtttgcattctcggcctggccatgatcgcggaagcagccctacggctttcatcttctcctagctatccgggatccctgtatgtccccgagcaactcacttcgtcctcgaccacatccacaaactacctagtgctgtggtctgtggagcaagggtaggtacgagacgggctgccgtaagccgctggcccctaacaatctgtagctgccatgggacccttggttgattgttcaggtctatcatcacatacctgcctgctgtggcatcagtaaatggcttatatgtctttcctgatggcagaaactagggatggttataaagttgttgtttcttccagtgaggacgtggtatcagtacttttcttgtgcttttattccggggagcctggggtttttatatgccgctttaacccatgcatatgtggcctcttgactcattgagtgctttgcagcagattaggcacctggttccagcccaaactggactcttccagttcgcttatgtaatttattcctggacaagccctaactagttaactaactagttagcaaccgttaactagttgactagacccccggttcaagggcttataaatatgaaatccattcgaaacatgtctataactatacctacctaggaactaggtggtcatgtatagatttccgcacgacccactgcccactgtgcctagtattgctagggagtcaaattgggtcacaagctttgggtataattccgctgatttcattgtcgccaagaccctaattcatgcacaaattgagtggaactgagggcccaaactggggttcccgggaccgtccctgggtctgggagagcctggtctctgactctctgggttgggcctaggttgggcctgggtctcgaccctatatttgcaggactatcctcttaattcgtctcccacggaccacaggctacggtcccacctcgtctcctaactcgaccgtcagtgcgccagccagctagaactttttatacttcctttactctatcgaaatactagattcagctatatacccacttccctcttatctattggataggcgaggatgctacgtaatgaattatgagagcacgtccacaagggctaagtcaaaggacttgaaagtagtttgaaattagtctttgttgtttgttatctgttgttaattatacataattcttgtcagggtattgtgaagctaacatatggcaaaggcaaaaaaaaaaaaaaagatgccaagatgaaagagattggaagaggcgccttatgcacttgcgttatggtcatgattgtgtaaaaacgccaagtcgctaattagacatgaatcatgatgggggtatgaaaaatcgcaaaagcagaaaagcgaggatattagcggaaggaaagcctaattaggcttggatccctggcccttgcgcttgtttggccataattgacctcggcacttactttcaccacacaggcactggacagcctcagggtcaatcttttgaggagttgtgttctcctcgccctgattatagtcaaaagttaattcagtgccggagggaatgtcgttgtacgcgaaaaatgcaaggttgtacagatattcgtcggcatgattcgtggtgcaaacagggacgatcttgcaattaggattgcatgagtggttcataaaccgagttggcgagccaaacttgcggccgtcgacgactttcatgttttgctcttcatcgtcgtcatccttcacataccagtccaaagagaaaaggtatgattgcgtatgagaaccatcggtgaggctctcgcgctcgtcagcttcaagctttgtaattacctcgccgaggtagaggtcgatgaattgcccacggtgaatcaagtcaggggaccgaagacctaataaaaatcataattagtacatatataggggaataggagtgaagggagacgaaccaaagccccgagctccagtgtcaaagatctccagtctaacagtccttcctttctgaacgacgtgattccagcatttttttccactgcagccacaacgggagttgcattcatagatgatcgccttgcgattaaggaaacttttagtcgccacaatcaatttaggattgctttcgcagatctggtaagggacgattcgatcttctgaatcttcttccttgctgaggcaatcgcattcgagtcgattgcagccgccagtttcagtacaagcacagccgatgttgaattcagaatcatccggaatccgttcaacacctgcgcggtactgataactgttgacgaactcgaagttatcggctagtttagcaagacgctttggggaatcaactttcggaatgaccgtaggcccattgatgcgcctaagcttctcgtcaagagtgtggcggagttttgaaagataattttgttccgtggacgatggtgggttgagagtgttgagagccgagcttgatctgaatgacaatgcgacagaacgacggtcaacacgagccctagaagtaggatatgcagcttttgtaactctttcctcttcgtcggttgtaggaaatatatcactatccattccattaactttagagacatctcgcgcgattgcgatctcccgcctttgctttgctgttggtgatggaatcacaacgctaatgtgagatggcgttatgcttggcgctggactcagcgaggatggacaccacccggatggataagggtgagcatgtgaccgcctatatcgtgcaaacttgtgaacatcgctcgacgatgacgaatctgaggtatcatcagatagcgatacctccacgcttttccttttcaatggcacagttggtggtcgataagttaacgttgtcacaaagggaagtttggcctgaactgatttctttggctagaagtgatgtttagtaaacaatccaagtaggttatgtacgtagtgccggattgccggattgccagattgatagtgagataaacagttggcttaaggggcgaagggaattggaccagacagagaacggcatagtggggccaggagaaatgtagtgggctcagtctttggaaggtcgaggtgaacgcgaacaagcacttaccagctcagaattacccaattcaatctcattggttaggtcaatgaacactcggttctgattagcccccgagccagggggagcgcgtcccgccatctaaagccacgcgtaggtgcggtagggtaaattgtaacaaactaaagaacgcgtgcgaaagcgcgtcgagcctcgcaatttcaatccctttcaggactggacaaggagagtgttggagaacaggctgctaagactattgagatgcttggggtgtcgacgagtcgaggattctagcctaaagagctaggtaaaaggaatcccggagaggagattcgagaaaacaacgtctggagatgaagaaaaagggagaaacaaaatctccaagaagcgcccgtaaaactaaaagaacctagaagaagatccaacgtctgtggcggatgggagacgtgatagaagatggaggactggaggtggtgaagaggtgaggtcgagaaaatgaggacggcaatatcatgtggtggggcaatatatgctgactcagcaccttggtccacattacctaaataggcaatgatcgccatgtgtgttagcgtctttgtggcctcaattcgaagagaaacatgtccgtattatgatttttgagatgctcatgattctcactatccaatgaattgattttaccttgtatgtttccagtttgctgtgttttgggttgatggggtatttcggttagcggctgctgattggtgatcaaaagggagttgtcaggaagtgcgggaacagcgccgggaagaattatgggtctttatttgattcccatagcttccaggcccgagaggaggctagaaatgcaggggaaaagctccaaattatagagctcagtgcctgctatcgattgatatatttatcagctagattagatgtggggaacagcgtataccgccgtctagagagctttgaagttttgactgttgcaaattcttggcatcaatatcggaccatgcgggccgcagcggacctcacttcatccaatcaacgcgctacgttattgatgactcagcgcagggggtcgcctattttggagagatttgatagtataattatctagaatcctatatacgatattataaacgggttataggtcggattattagcaatatgcaggcgtcgcgtgtgtataaagtggtaacctctaggtaggattagtaatatattagtaatcacacgtgacggatctgcacaacccggaagaaattccggtgcatccggtcgacttttagcttaccaggggcgtttggctcccaagaaatccgaaaggctgtctttttggcagactgtgttaaaacttagggctcagggcccaggggctagagttggtgttgaacttgtcgcatgggcgcaggggaccaggggtagaccgtagaagtccctagtcacataggcaccgttctcccattaccgatggccgggaccggggactccgggtcccattaatgatgtcccattgtcccatttgcgatgccccgttacccgcccccgtatacgatctcgattctctcgttttagatctccgagtacaaccatttggccatggctcttaaacacacagccatgcagtcagtgacttaagtcttcaatgttcatgacctaaaggctaaagcccaaatcacccagtactactccgtagtaagagtccataattatagaaaatctaaagttttggtcgccccgggccctacttgcaatttataaaccgaatttttttcaaaatcctctaagatgtaatgaataattttgcttatggagaagctctgtctgtagttaattacttttttattcggtttatttaggaggtatcaggagctctgaagatttagcgatcttagttgctcgggggcagtgttcgttttcgggttacttccgccaactgaccagttcggtcgggcgcccgggcgcaccgacatacccccgacacccccgcctgttcctaagttcgggcaggtgcgggttacacaccaacttaactggcgggccttggaccccgagccctgccgtgccacggcccacaacagcaggtagtgcacaactgcggccctctgcgggtggtgctcctggtgttcggtcccactggtttaccggtattagcaacgaactattgagttacggagaagatcgcatggtttgtatcagttgggtaatccaacaacaagtactattcagtacgggggctgggaatacctatgagtgcaaaatcggtcccgtgatgggccgtagatgatcacatgacaggggtctaggatcacactatcaaattgacattcatgtatttaccttgtataccctctttttcctttattgcatgtatatgcttgacttcgtgtaaaggatatgtctgggcgcacattctcctgctcggccaaaagaccattatatcagagctctcgctctggcatgtctaggaccaatatatatatatagtactgcacaagttatctgtgacacggctccggatatctcctttccattacattttaagcatattagctctgtgcgcaatacttctggtgctactcgctaccgcaagcagaagatcactcccgcgaaggatgtagctttcttggtttattcttccgggactacgggtgtgcctaagggtgtcatgctgtcgcatcggaatatcgttgccaaccgcagccttgtccgtgatcgccagaggttgatcggcaggatcgagggacatctggtagttctggtagttcatgcagggctggcagatctattaggttgaccaagtattagaagcagccaaagtgcgtagctcaagacagacctccgtctacgtaaatacatatgccaccatggccaggtttgatttcgagcccctagactagaatttagggtgttaacgctagcttagctggattgtcaagcgatatctgatgttggctcggcctcgacgttcgatctagctattttaggccgaagtcaagataaagttccgtttaaagacctcgggaaccaccagcaaccgaaccatggtccatggataggtgaaggccctgtatgtatgacctacacgggatgtggggaaagcaagccaacatacatcgttgaattacaacaataacaattgacttgaacttgtttgcgcagtatgcgatagcttacgaccaaagaactctacggaaaattgccgcaaccattttgtatttgtaggcacaacataaagttcataatcaactgtaggtacaacaccatccccctaggccacaacagcaatagagaacggtggggaaagcaaaagctaaagcaaaacgctagcaaccaaatcattctcactcgattctagtgtacaccatgaagaccagagcaagtctagctaggccaatgagtattgaaataggcgagcagtacttaggttcaggacgaaaagagcaaatgacgggctaatgaagataaatgatccctctatgagagacgggaggaaagcaaggatagcaatggacatgcaatgataacggggcagaatcgatgaatactcgtgtgtgcggatgcgtcgtaagtggacgtaactcaaaacaaagcgaataaatcgccaactatgtgccacaaagacaagggaagggggtcttggcatggaatgtgctccttggccaaggatcctacgtcaaatgggacaggtcacagtttcaatgcatcgaggatcttcttcgccatctctcgatattgccacatcccgcctgatacctttttgaattgaataccatggagggagaacagaggtaccttcacgatcaggatttcaaatcgaaggacgaggttctctccggtgtcgctctgtacacgggtagtggtttcgccaaggacacgttcgccgaccggaccaccatgttcccgtgcaacatattcatctgagccgtccgagttcgtggtgaaactgcgatccggcgcagcgtgagctcgacgatgtctagaggacccagtgcggctctcgtctcggctatcctcgtggctgaggaggccgccaaagctgatacgacggcggtgccctgatacctgcccctgtcgttctggactggagggggcaacatcaactaccttgtcgaggtcgatgctgggggcgtggcggcagctaaacccacccttgatctcgacatactcaaccgcgagctgcctcaggacccgaataatgtcagcccggataacgggcaaaggtttgctgctggtggtggagacactgaaaagaccctttaggaacactggtttggacagatcttctccctcgttggcgctctccagtgccgttcccgcgccagaaatgtcagcatcggtctcttcgggcacattggcctctcgggtagcgtctcgccgggcccggcgtgcctgaatactttctcgccgagcgtgtcccagcgacatggtacgcgccgtatgcgtgcgcccaccagtcctcgcgctggccggaactttctggttattcggaacaacctgatcagagtcactggtagacggcggttgacggtctgcagtaacgtccgaagcatctgcatcacttctccgtccggctctccgagttcggtagtctgccgaattgacactggtagatctctccaggaatttgttggaccgtgcattgcgttccgattctggcgccgctagaagatcctgctgtggccggctgtcattcgaagaggtctcgcctggagatggttctgcccggcgagttctccttacactgaagccacggtgcatcggagatgctgaatctgcaggaggttggacattgagtgtgggtgtgttgggagtgctgatgcgttcacggtccacatcgcggctgcgatctttggccctgcgagtgctaaatcgtctcaagattccagcagcagtgctttctttcttggcaggtgtgtcggggtgcgaggtagggaccgcgtgcgcagatggcgtggaagaatggaatatcttcaatccttctgaggcttcgtcttcgccatgagtgcgggcccgtggccgagatcgtcgtcctgtatccttgtctcctgccaactggtactgattggtgtgggcggcttccggaggccgcagctcaggcacctgaacttcactgtgggtttgacgaagatcaagggcaccaggtcgtgcttcggcccgctctcggtcaagtttttctttgactagatgatatgtggacaccaacggactgtaagcatttaaagggtcgttgcccagttgcacagcctccgctgaaggggcggaaagggtatcacgactggccgcagagtttcgtcgtttgtagaaatcgaacactcctcgtttgcgctctgtgtgattggaaacaggctgttgtagttcgcggaagtacagccggatagcatgttggtaatcttcggactccaataccttggtcaactgagctgtaatgtactccggaggcccaaagtcaaacccggtcatcttttcaataacctctggatctagaggtagctgtaatggctcacgctgggggaggtaattctccggagggttactaaaacccttgttcatccagggatggttcatgatctcggccaagctagcacgctgcttggggtcagtgaccagcatgcgggatataatgtgtcgacactctgcgaaacacgatcagcaatggaattagagaaagcatcctgcaaagttgacttaccagcggtgagacctggcgggtactccaccacacctttcttgattttggcatgcagctgaggcatactctggtcatcgaaaggtaccttcccacaaaccaagacataaaggacaattccaaagctccaaacatcaacttcgggtcccgtgtattgtctggcctgaagcaattccggagcagcgaaatacagactaccgcagaatgtcttcagaaggcttcttggggagaacaagttgctaagaccaaaatcaatgattttgatatcaccggtcttgctgataaggatgttctcaatcttcagatcgcgatgcacgatgctgttacggtggcagtaatccaatgcgctggcgatctgtcgtgcgaacttgcgtgcttgcttttccttcagtttgccgtgagagatgatataatcgagcatttgaccaccattgacatattcaaacagcatgtaccaatggtatgacgttcgaacaacgtcccgcatgccgcagatatacggatggttcactaggctgacaatggcggcttctcgggctgtccgaatctcctttgagcgatcggctctctctgtctcccgagtagtgcgatgttcctctgtcgagagtcgtggcacgattttaatggcaacctgcgaccgtaatcagtattgttttaagacaacaaagagttgaatatttgtacttgttctccggtctccgtatttttggctaatttgacttttcccatacttccggcacctattgttttgcctaaagcccattgacccgtcggcgtcgtgattgtagtccgtcgcctaggcgcggctgcggcggcgggagcagtggttgcggtcgcatgctgcggcggcggcggctgtgaagccgagcttggtgtcatatcaacactgtctcgtagacggctctgcgatgaggggtttctttggtgtcttcgggcagtttcggttcgagcggtagaggggcgttcctgagatcggtccgatgacgtttcccgacgagaaggaatgcgcgcaacattagacgcctctgattctcgtcgggctacaccctcgagtgcagaatggtttgagggaggacgccggtcttcggaaggagttttcgaatatgacaagttggttggcgtaggaggctgggacgtattggatggtcgaactgccacactgcgcgtccgatgggggagatccgatggggctcgagaaggacgagaagtagttgagtggctgcggaccacagttggtgcgttagtggtcggtactgacattgtggatggggctctctttgagggatttggagcggtcaaaggagtggggagagatgagggaagccgcagccaggactcggcccgagcacagttctagcggtgcgaggagggtttcacagaatgaaacaaatctcgtaacgcgaacgcgatgaaagatggtgatactgaaaggacgagatggtgggggttaagagtaagaggaggttgggatgcggagatcatctaggggcgacacttgcaaggttggtaactaagctctcgagttgatacccaaattctgtttgaggctgggcttcacccccgattatgccccttttttttggagtaattttctaattctttagtttttttttagcttactgtttattttctagggaacactattgacatgcatataaatgctactgtgaccacgtcaccacctggctacgtgcaacgctgaggaactggaactactaatggaacgttcattagccatggtcacgtgtgtccaggtactataaatatctcgaggtcagggtacacaacgttataagtctgcatttatataatggaatattcaaaaagagcatggctgaggcgagtaatgagtatatcaccactcttttggtccgaaagtctctccatctgcgacagtctttcgaactgccgtataaagagagtcctatgttcctcgttaggacccacgtcaataaatggcgggatatagttacgtaccatggtctcgtatggagcaatatttccccaccattggggtatcgagacatttggcagaataatcgcaaagaaaataacaatggtggacagaatgaggcccgagtcaagtcctgcggcggtgatatagttgtaagtatgccaccaaccgccccatcggcgtcgaatccagtagttgaatatgaggccaaagataacccatgaagagaagctcaatggggtggccctgtgaaatgatcagtaagaggcaaccgtgaacaatagcatcgggagtgttgtagacttacggaggcagccaggccatagcacctagcatcctattgatacaattagcacatttcaccaaagatgagcttccgcgacttacacaggtgcgtttaggaacctgagcttagaccgagggcgcattcttatcaagacatagaataccaccggaagaagagcaccaatcaaccagaaccattgtatttgcatgtacatgccgccaggtccaaacatacgtcgtggaccaatgacacctaaataagaagtcagtaatatgttgatacatccctgagatagaacaaactgaccccacacaatgctggatgaaaagaatgctcttccattcgggcatgtaaaattccccgactgagtactattttcatagatggttaatacatgttctctttcaaagatgtgcataacatacgttgtgcaaacttcatcgatattgttcagggtccagttcatgactgcaatctgaacaatacttgcccataccgttgcaacaacttgacacataaaggtgacgcggggtggcactttcatataatgggccagctgttgttgaagaaaagtcaacaatttggtccactgacatggagaggaagtcccttactttgagatccgaacagtatacttgactattgacaaggtcagtcactattctgggaagagaggattgaaccttacgcttgtcccaaggtgatggtgctaaagaccttgaataccatgaccgcaatcggctttcctggaatcatgaaacctgccagaaaaggcgataagacattgagcgctatataaattagcgttgcacccacaaaaaggtcgagaccgcacgtacaaagcataatattggtgatgccgaggatcacgcaagtcggaatctgttggatgagtcagaaagaaccttccagtggccatgacaaaacgtactataaagacgacggcaatgataattgagacaaaaaagccccaccctatgtttgattagatttgatcatcagatctcgaggagtattgcatacaagggagctgcgaatcatatgccagaatgcctgcaagccctagtgcgatcgagcataggaatagtgtcgcataccaccagtcgggggcttctttgtactttttcatcatgataagatgaatgtcgggttcctgattccgagaagccctgaattgatgccatatctcctttcgatggaagagaataacatgtacaatagctgctgtaagggccgcaaacgacaatccgtagttcaaggcaaatgtcggagctaggaacatcggcgaatatgccttgtatttttcctcatcaaaagagaaaccagaacctaggattctggtcacattataggcgctttgcgtgttgtcataggtgctagacgtgttgatagggagataggcggagtacctatattgtgtcagctttgaaatgattgtggtgagatgtttcagcatacaaagccccagagtaagagatcccgattgtggtgatgattacaaaaaccacaagcccgatgaaggtgttgacaagagcatggacaggtgccaagagtggatctccgagatatgcagaaacatagctggttgtaattagctttacatctttccagcatgtataccattgacgggaatcttacgtccaatcaaacgtgataggaatgagggagagtcctgtgaagcctccgaacaactggttcaaaaccacattgttgggtcggatccctacaggcaaaaagagtcaccgcaagtcaggaatgaaacgagtcaacgggatcttacatgtgacaaaagcaaacacagagagtccttgccataggactcccggtaccctgcagttcgaagaaatcagtatatgcagttcaaattagaacaagatagacttaccaataccagataaaagacccaattgtcacatatagaaaatatcggtagcgtgaaatgctccatccgtgggtctctgattcatccgaggagctccagtcgtgaagagcataaaacagggaagtgttcgcaaattgactaggccacatcatagcagcgggccttgacatcgtgagtttttggggctcttggcaggaaaggttccaacttaccagacgaggaaacggcggaaaatgcctgccagggacataccaattacctgactgctcaaagcgaataatagttggaaaccccatccaagttccatattatatagtgctggaaagtgcgttagacaatattgaattgacgcagagatgttgcttacgcttcgctttcaatgccaagagggcatctgtacaataagcatagccgatcgacacactatatattgcttagcattgatatcaaagtttatcaagaactaccgactttgccatgatctgagaacaaaaggtcagcttaattgatttgaacaccaactttcaagagcttactgtgataaccgcatgctctttgatagtgaacggaccagtattcaacgtccatttcactccaaatgtattgaacttccgagtcggcattgtcttggcccacaaacaacctatcggatagaccagcaactgaacgacaatagcagggaacgagatggcagggctcctaatacacgatgagtaaattatcccctacttatagaccgcagaaccaaatctcacctcatgctcagaaacatattgagaccacttccaagagtagtgaagaacatgcccagcacccacgcgcgcacggtgttggcaacttctccgccatctgagttgcgcaccgcggcacgaacagactcatactgggactcatgggcgagagtcttttctaactcgagggccctctcttgatcatctgtcttgactgcctcgttgatagcatcaatcttctcctgtggcaaatttggatcccactggtgggagagttggaccttgtgtaactcttggatcgtattggttactgacttcttatcgtttggcatgtcgagctgggatgggtcaaggccctccgtgacaggtagatgcgaactcattctgcaacaatagggcaacaggtaacctggttagggtctaaatgagatatcggcttagagttaaaaacttctagacatggcagcagggctggaataaatacaaaaagagagagatgaaaggagatattaaaggagattatctatcacagcaaatggccgaggcctatactccgtacaaagcatcagttgagcttgagttttcttatctcaactaggaaatggctatactaccaatgtaggtgtatgtatgtagacaagtccaacccgagccggatcctgttgccggtctagccgttaagatgataagtttcttgaaagacaatgtagattttgatttattccccgcattccagccctaatcgcgcttgctattcttccgtcaagataacaatctacctgctttaggtataaatgcggagaaaggccgcgcaactttatgagctagtttagtccatgcgatatgaacaaaaaccaaccattcggaccgatcagcgacaggggatataatgtcggagacaccacccgatgtagtaacttgtggtaggacttattcattttaatctagggcgctacaatggtctgtgttcgtttacacaagcctatctttttgtttttctgtctagtcccaggaaagagtttcttatccatttcacatgtcttcttgttccgatttcctacccctgggagtcaatttaaacaaagatactttttttaaaacaaacaacaggcaaagtttagctattttcgagcgaaacagagcgagccgcattctgcctgacatggtatctgtcacgtcacccaggggcattgccatccagcgtgcacaagtcgacacaatacgcgacaggattgagcgcatcaccgaggacctcaaagatatcaaggaatttttccccatcaagatatctccgaggagaacacaaaagttacgccagttccttacatccgagctcgactcactccgcagccagccctttgatctttatgatcagcaagggaaggtagattatattctcatgaaaaactacctagaaaggcaactccgcgagttggaactcgactgtaaacaggatgaaaaaaccgcactgcttctaccattctcaggcaagctgctggagctgtgtgaagctcgcgttatggtgttatcgatgaatgcaaaagatgctgcccagaagcttgttgaatcccaggctcaaatctcagccgtgatagacatggtcaagggcgattcgaccaagttccggatggagaaaacaattgcatttagagcggcgagaaatatagactcattgcacgataacctgaaagaatggttcgaattctacaaaggctacgatccgtcgttcaattggtgggtgtcacatccatatggggttgtggaaaaaggattgaaagatgtctcagcaagtattcgagagaacttggctggcatccgcccagacaacgatgatgcgatagtgggcgatcctatcggtcgagaggggttgcttagcgagctcttgggtgaaatgattgcctacacaccggaggaactaatctcgatcggagagaaagagttcaaatggtgtgttggcgaactgaagaaggcatcacgcagcatgggattccaggacaattggaagcaggccctagaagaagtcaagaatgattttgtcgagcctggaaaacaaactggattagtccgagatctcacggtggaggcaatctcctttgtcgaagatcaccaactcgtcaccgttccgccggtcgccaaggagaattggcagatgtttatgatgtcgcctgagcgccagaaagtaaaccccttcttcctcggcggcgagtgtataattgtctcgtatccaaccgaccagatggatcatgaagccaagctgatggggatgcgcgggaacaacatccatttctcccgcgctacggtattccatgagatgatacccgggcaccatttgcagatgcacatgatcgcgagatacagaccctaccgccgcctatttgacaccccgttttggattgaaggatgggctctgtactgggagttcattctgtggaatgacgaacggttcagaaagacgccgcagaaccggatcgggatgctattttggcggcttcatcgatgcgcccgaattatattctccgtcaagttccatcttggccagatggctcctgaggagtgcattgatctacttgtcgatcaagtcggacacgaacgtgccactgcagaaggggaagtgaggcgatcattaaatggcgattattcgccattatatcaggccgggtatatgctgggtgcgttacaaatatatgcattgcggaaggagactgtcgagacggggcttcttgctgagaaggaattccatgaccggtttttgaaagagaattgtatgccaatagagttggcacgagccttgatgcaggatcaatcgttatcgcgtgagcacaagccgtcctggaagttttattccttgtagaaaatattttgtcgcggtgagcagggtgatgagaaataaatgaaaatattgttgtctagttatatatcgaagagcagtctgaccacggtcggctagcaagcatggggattacacagaccgtagtagacatccttatctcttaatgcagcaacatcctataagctcccttctcattctgtgagtggtgattggactgtcttctccccttcaggattctggtgcacatgaaggccccgagattttctctctgcccgaaagataaggccactacttgaggattccagctttccccactgcaatatatatatttccatgaatccaacacttagccaaagcacaaactacccatatctatgttttggcctcatccttgaaagccagaatagcccctggttttcgggcggaagcgtaatgacttctctgccgaggtaggttaccataattgaaatcttccttgcttgaaaccccaaagacgacattttttacctcagtgaggaactacaataacgtacaggttggagttaatgtgtcattatcattggtggatctagataccgggtgactcccactggccgagctgtgcttctaaacgtagtctatgtaagcaagagatgttggaggcgtacgtgggacactcggatgaactacgtcataggcctagacaagaagcctggggctaatacagtaacgtatgacttgcataggatcggacagcaaatcagccaggtccaaccccgcagtcgtgcatagccacattaggtgttaatgacgagtttacttctagacaaaatcacatcttctagaaaagtaagggctgtttgaataagcacgtgtaacgcatttcctgtatcgtgaaggcaatacggaggttaagagcaacaaaataaatcttacctcagagagacacattactctgtgtcaatttaggtgcgtagtattgttgattccctataataatgatcatgacagcataatattccatggacaactatgtatgctcttgggatagctacattaatggggtaaaggtgcccgttcatacgtcatgcagccagatgtgtgggtccggggatagtttaggttgatctcaaccgacgcatatgtggaataacatttgaacgaacgggctttggaagtagatggaaagtttgagttggctatgtttttgagagcctcaaataatgttcacgtgtgtattataactgtaaatcgaacgctttgtcttcctactaagatgaggtcaggaaggttagaaactgtaaactgtggatagagccggggggctacggcaaccaagattccaagattccaagattccgatgtttacaatgcagccaaccttggcgatgtatgtgacctaaggaaactgtgagataccacggtgatgtcatcatatcattgcccctgccccggtgggactccagacagcataagtagccttctacttcccttggaattgacctattcttcatcacaactcatcctctactatctcaaataacttttcaaacaaccaaacgctcaacttcaaaatggagaccgccaaggttcgtgatcaaccaaaatctcttggtatttgctttatcattaactaaccaacaattatagaacgtcgttaactacgtctctgagaccatccagggaactggtgctgaggcttctaaggaggctaacaagagcgtcgccaaggacagcgatgccaagttcaccacccgcgccagtgctgccaaggatgcacttggcgacaagacggacgaggttgaacacaacaccaaggccgatgtccacaagggtaagctggaattatcgaacaaaactgctctaaaacggcactaacaacattccagaggctgccaagcactaaagtgtcaccttcacttgttatgtacaccatctagacggaattccggtcttttgatgatttgacgaagtaaatagttagcgaacaataccatctacaatttacgacattcacaatatctacagatagacttttagtaattaattatgaggcatatacttgacctcgcgtagaagttgtaaaaatgactgacatgtgcgttgacatgagcctgcctgcaaatcgaatttacaaaatataaacctttggcactctcccataacaaacagcaccactttgccacgtggtatatttggaaactagcgcagagcctatcggccatataccgaagatggtgggtgcttgttctagtgttattgggtggtcggcgctggctagactcatgattagaatgcatgaatcggaatcgggacttctggattatgaccggacttgtgataagaggctttatgcatataagcagccttgggcgtgcgttgtcagagctggatcatggtataaagctctgcgatctctgctcacccggtttacccggtttaccctgttcaccctgttcaccctgctcgactgctcttgccaggatgcatgaatcagaatgaggactactagcttcttactggtcttacgataagagacttcatgcatgtaagcagccttgagcgtgcgttgtccttgtttatggtctgaagctctcaccccgcttagctgctctgctcttgccaggatagcggggtccagccatccaacaagtaattgactcaaactatgaagcaagtaaattgattcgggcttatgaccatttgccagggtaaagatgttatctattaccagtgcttggttattctgaatatataaacggcaagaaaaccacccactccttcttagattcaatctctcaggactcttgcatccgaaattaaaccctaatagtaccgacatagtaagtttaggctgtcttactacactattctaggtaaagattttacacatagctaatgtgatacctctagggctattacctacctcccaacacgatgtgttataacatgataacatatagctgcggccacatcctcaagtcgcagtcgaccacctgcccatgtgacaagaaggatccggacatgacctcgagcttcaagtgcaaaacaacatgtaaggggtgaaattggtcaccatgcttggccgcgccggagcctcgtggcgctcgccaaagcacctttgagtactgaagggtggacaaattaccaaggtttctagcagggatatttgtttcaattgctggcagagtagctcttgcaacttgggaaggagagtggtaaaccacagctatttattatcttgacctcggaggctatcaaatattgtgcggttaaattgctatgactgaccattcctacctagtaatttatcttggaactaggactgaatcgaccttaaaatcgttcacttgcgatgtctcgtcaatagggctcgaggacgtactcaggcatcaataatggcctcaggcatcaaaccaaagacaaacttctcaaacaaccttggaacccctggagaatatctcaaacaagtccacaggcacaactgtacctgtacctacatgaccccacgtcctcagtgctaccttggatctgacaatcccgatgttctagactgcattaactgattggcgtaccacttgacacagactggtggactgccaatgagaccctggtagatgggtcggcaacgagttgaaacgtgttaggggtgccacaggaaaagctagtcgatgctgacgcaaaatctgatctccagtgccgtggaaacaacaaattatacggagtacatacctatgtatgaggacttcatgaagacaagtggctacgttgtggctcccttttccaacggtgatcagcattatatccatgacccaattctaattataactagtccagaccaaagtttaccaaagtccactaaagtccaccttttttttctctttcattcgtgcgcattatctttgtctcacatccgcttgtctttcccattcaatcgccccgttcccctcgtttaatctattttatttcgacttcatgctgggctcttgatctactccggcccctcgttcatgccggatagtcattcgttactgctttgacgtaatggatctacaacaattgggcttgcatgcccgcacggatgggacagataccttccttgagctcattgcaaatccatttcggtctgcagtaagtcgaaattgtttgcgaggaggaacaccacattgacaagctatagtttacagtcactgctatttgggcctcgctaggcacctcgatcggcgtcaccgtcctcctcgctctcctcttctccctagttcgaccccgtcactcgcttgtctatgcgcccaaagtcaagcatgcagacctcaaacacaccccgccgccggtgggcaagggcttcttcgcctgggtcaagccggtgatcaatacacgggaaccgcagctgatcgagtcagtcgggctggacgccgcaatcttcctccgctttacaaaaatgtgccgcaacatcttcatctttctcagtataatcggctgcctcgtcatgataccggtcaatattacacagagcaagaattctactgactcgacggcgtctgccgccttcaacatgatgacgcccctcaacatcaccaaccccatggccatttggagtcaagtggtatgcgcctgggcttttgatcttattgttgctttcttcttatggaggaactatcgcgctgtgcggaacctgcggaggacatatttccaaagcgctgaataccagcgcagtctgcatgccagaaccttgatgatcacggacatccctgtcaatagtcgtaccgatgaaggtattctgcggctaaccgacaaggtcaatcccacctcggccctcccacgagctgctattggccgcaatgtcagggatttgcctcgcctcatcaaggaacatgaagaggttgtccgagaactcgagtccgttttggccaagtatcttaagaacccggaccgattgccagcgaaacgaccgaccctacatccccctcgccgacaacgcaaacaattccccggcggcaaagtggacgcgatagattatctatccgtgcggattcgcgtcttggaagaggaaatcaagcatggccgggcgtcgattgatcgccgaaacgcgatgccgtacggctttgccagctgggacaatatcgagcacgcgcatgctgtggcatggaacgctcgccgcaaacgccctgagggcactactattgctcttgcgccgcggcccagcgatatcatatgggaaaaccttccgctttcaaaatccgcgcgcaagtggaagcgactgatcaattttatctgggtgacaggcttgacactggtgtggattgttcctaacggtttgattgccattttcttgtccaatctgtccaatctgggcttggtatggccggcgttccagacttcgctggcaatgaacccaaacgtttgggctgctgtccagggtattgcatcgcccgcactaacttcgctcgtgtatctggcgcttccggtgatcttccgtcgactttctatccaaggtggtagcaagactaaaacatctcgagagcgccacgtgctggggcatctgtatgcattcttcgttttcaacaatctgatcgtcttctcacttttctcggctgcttggtacttcgtgtcgttcgtggttgacaaaaccaaaaaccacgaagacgcttggcaagccatcttggaaagccggatgtatgccaaattggtaagcgctctctgcaccgtgtcaccgttctgggtgacgtatcttttgcagcgtaatctcggcgctgctattgatctggtgcagttcgttaccatggcttgggtctggttcgccaagacgttcctctcacccacaccccgacaggcaattgagtggaccgcaccgccatcattcgactacgccagttactacaactacttcctcttctatgccaccgtggctttctgtttcgctaccttgcaacccatcgtactgccggtgacagcattgtattttggtgtggatgccatgttgaagaagtatctattgatgtacgtgttcgtgactaagaatgagtctggtggtgcgttttggcgtgtgttattcaatcgcatgatcttcgctactattcttgcgaacgtgatcatcgctctcgtggccaaatcgagcggcacgtggaacatggtgttctgcgtgattcccctgcctttcttgatgattggattcaagatctattgcatgaagacgtttgactccgattgcgagtttgtaaaccgtgcaaatctaagcgatgccgaggccttaggtgtgaacacctcagacaagaaagcgtcagaccgtctgaataccaagttcggacaccctgccctgtacaaaccacttttgacacccatggtgcacgccaaggcagccgcagcactaaaagaaatctaccaaggtcgtctggaccagggtgacatgggcggcgagtactcagacattgcaatgaacccgatgctggcctcccagcccggcaagtctgccgaacccgcgcccttcgaggtcgtcccggagaaccatctagacttctcctactacaaggatcgagcagacttccgagacgagttcggaggcggcatctacggccggcctgatgacctgatgacagagcggtcacatacaccccgcagtaatttgcgaggcgagtggtctcccggctcatctcgtgcctcatcacccgcaccctctctgccatcaatgccgctgaacatgcacaagggttacgaacacgaacactccgacccgaccgggcttatccacccggccttccgtgtgccgctatcgcggggcaacagtggcaggtcggctgcaaacgcagacgagtcggagtccggactcctcagcaatgcacaggctcctgggcagacggatatcacgaatccgctcggtcgctggaggaccggtggttatggaccagtcgaccaggaagacgagccctcgtatacttcttacgacgcttaccgttcacatgggtaagctgttcggtcatattagccctgctgggcgaaacatttgcatctgtatagttttgtattctacaacatttctcggggggactcagcgtcatttctaaacacgaaggtcacgatttatttttttgctctgctcaaggcacatcttggaaatcaccatttacacgaagtggacaatttaaatatcatatttaatatcaaaatatcaaacttttacaaacccattcaacacatcttcagatcaatgccagccataaacacaggtcaagcctcacgtgagtattcagggtccagccaatcagatcagagtaccccaatcgtggaatccaagccgagcaagtgcaatttgactctctacagttcatttactgagaatcaaagcctgactctaaaaaatgaaccaaccgtgaaaaaagagctgtcagcagtgggtggtccgagtcgcagcgcgccaaagcaccgacacagctccaacccaccaacaaccgcaacctcccgaggctcacgagcgctctaatacacagcaaaataatggcgtggtactccatcctcccgccgggactcaccgaactcgagacctggttagctcgcatcttcgtgagtttccctctttcctctccgactttaccccccctcgtgacgcaccccttatgacgcagtcgctgacctaccccggattcgcagttcttcctcggtctcatcaccattggcccctgggccttcctcgtactcctagacgcaaccatctggatatatcgtatgaccctttgggaggtcccctggattggtggacgagcacgtggtcgccagcgccctcgcgcgccgagcttgaatgaacgcccggacgggcaacggagggcatttggactgcgcggcgtggagacggataccgggagcagcgagggagaaaatcaagatgattctccagggcgaaagggggagaaagatcgtgacgactctcagaaggagaatgtgagccctgttgttgtccaagcattaaatccacatttgagtggagatggtgtcttgaaacaaaggagctcggggcagatatgatgattggattgcgtctcctttggaatagtgatgatgtttatgaatcttgtgttattgttgtctcttgtcgctttgactatatgagcaagcatacatttcttttattgctcgtctcgtcttcccaggttgtgtgtgagaagacttatatacctatacatcgaagattgtatgatacttccagagtataacctacaatctattatacaaagccctagataatgagtagccaatcttacaataccccaactgtcttatcttgaaagtgccaaccccgcaggtcccgacatctcggccgtgtgagtcaatcagagaacaatggacggacagttcggccactcaaagtggggagagataagctccaacacgactctccaagccaagttcgctttctagtgaggagttcatgcggagtaggaggttgttcaaggataaaactctccgttgagcagggatctaaacttcgacagcttagatccactccatagtgatttgagcaggatggcacgcattctatacaaagccattgatacaccatggcctccattctccatatatctgttctttgctcttatcgtgggcacatgtgctgctgtgtggagggttcgacaatcccgtaaggctaatgcatacgggaggacgaagacaactttctcggacaataagacatcccccatcatacctcttgaaggattcaactgggaggagaccgagccgttacaattccggccgtttaaagggaaagacaaatacaacttgaccatgggtgagtccctcgtctgatgctatacaaatataccatactacaccactcgacacatatcgagactaatccatatcagcacttgaaagccttgatccgtccgagctcatcccaatggacaaaacatacaaggaccgactagctctccgcgagtccgtaatcgaccagcaccacgacatcgtggtgggaatcaacaacgaccaaaccccagaggaggatcctcgcatccgtcccgccattagcgaactatacaattatgttctgggaacatacctaccaacccgatatccgagcatgttccgtctaaccgttggaagctcgctcttccacaacctggtaacaggcgcaacgtggccgacaacgctgtcgccaacgacgccaacaatccaagccctagaaagcctgacccagacggtagacgaggatttcctgatcctgctccctgagttattccccgaaaatgagaaacagccgaaatccgtactacaggcatatgcgatctgtttcccggctggcttcaacatgagcgagaaactcgggcagcgtttagccgatattcatgtaccggtcccggggtatcaggaaaagattggacgcagcatggatcggttctttgcgcgcattgaggttgggaggtttgtgaaacgggctaattggagtattactattgacacgggcctgtttgctgcttttggtgggacacatgctgagccggggaaaaaagaggaggctattgagcccgggaaattgaatgttgatcaggtatgttggcttcgaggaagtccatttgatcggatagtgctgatatcactaaagacttgtctccgatgtgagcgtcagacgttgcatcggctgccggtgtccaaggctctcgtctttaccgtccacacttatctttatccaattaagcagattaaggatgagggttctggtgaggaccttgcgaacgcggtcgatggcttgaagaggggtaatgtgccaggaatgcatatttataagaagggagatgtgtggggagaagcattgaaagacttcctaaggacttagacacttcagtatgttggagttctgcgcaagatacatgaattatatggtatatatgacaccaggcttggactcagaaagggcgtttctttatttatatgcattgtcaaatttttggtttgattcttttaggcctccaatgctcgcaatttagcggaggcgctcgacaaccttgataagatcggccgaaacacccatagcggtaacttcaccaccggcaccggcaccctgcacaatcaggggattggcaccgtagcgcttagtgtaaaagctgatgatgttgtcactgcccttcagaccagcgatggcgctgtccttatcaaagtactgcagaccaaccttgacagccttggcggcgacatcaatgcttccaacgtagcgcacaaccttgccctgcttctcggcagtatccttgatgttggccatttgggcatcgaactcagggagacgagtcatgaactgagtaatgccgtccgcggatgaaggcagagatgcgagctcagcggggatcagcgactcaatagggaaagagtcagggcgggaaacctccagaccagcaatacgggccaggatggtcagcttgcgtgcaacgtccatgccgttcaggtcatcacgaggatccggctcggtgtagcccagctccttagcctgggcgacgacagcactccactgggcatcagaagcacctgatgcaggggcaaaggtgttgaagaggaaggagagagtgccagagaagacaccctcaatgcgggtgacctcatcgccggtagcaaccaggtccttcaaggtcgacaacacgggcaggccggcgcccacggtgctctcgtggtatacgagagccttaccctcagccgcagaggcaaagatatccttccacaaggacagatcatcggagaatcccttcttgttgggtgtcaccactgagatgcccttcttgaggaatgtggggtattgccgggcgaggctaatgtcagaagtgttatcgaccaaaatggctcggccaggtgcggaggcgaggtatgtagcgatttcttcggcctggagggcaccgctcttggtcagcgatggtgcggcagcagcagtggcccaatcggcggcggggatggctggcgaataggcgggactcggggaaaggagggtctgggaggaacgggcaaggaggacaagctggggtgcattggggagacgagcgagctgttggaggaaggccgtaccaacgcctccgacacctaattgataaaatcgttagtactcaattggttggacttttaaagctcagtagtgagggacacctaccaatgacaccaaggtagataggactagccgacatattgctgattgatgattttttttcttgattatttcgatcagcttaactttctgattctcagtcaagagtccaatatcagatcaaaactaagagaacaatcaattgactcacggcgcaatcgattcacctgagtagtgggggtgcggggctgccccgaatatcggcattagtcattaagagcggcagaaaatgacataagggttggcggtgtatattggcttatcgataagccggtggctgtaggaaatacggtaaactccgcgcgtgaaacctgtaacttcttgtcactacacgtgtatcattcacattatcatgcctgctgatcaggattccctctacgggcagccgcgccaaaaaaagaccaaaaccgaacaagtcacctcctcaagcctcgccttcacctctcagctctcttcactcatcgcccaagatgcgacctcagcttcgtcgcggggacgccaccgtccctccaagaatccgaagtctgatatcttttcaaagcacaacaaaggtactcagaagcgtgcagctgccgatcttgcagatgacaacagggctctcaagcaagttcacaggagcacccaggacattggctctgttgacgccatcacactgggccggtctcgacgtcgaatgcaggaaaaggcgcgcctctacgaagatatgaagaagggattacatcttgccggtgatagtgatgatgatgatgacatgtcggctgatccatccgatccggacgcctacctagcccgactaagacgcaaggagaaggacgtattggttgattttgatctcaagcacgcaagcgaggagcaactcaagcaagatgagtccgatgacgacaatgcatccattgtttcctacgaagacgaatttggccggtctcgccgtggcactcgcgccgaagccgccgaagcttctcgcgccatggatgaagaagcgggtgccaaagctgcccaagaacgctggcgccctgctcgtcctgacaatttgatttacggagaggccgttcagaccgaagccttcaatcctgatgccaacattgcgtcgcacatgtcccatctcgccgctcgtcgtgaccgctcgcctaccccgccggagaagaagcattacgaggctgaagcggagattcgcaaccgtggaactggattctatagcttttccaccgatgagggggagcgcaagcagcagatggaagaactccgagttctgcgagaggaaactttatccaagcggaaaacggacgaggaacggatggctgagcgcaaggcccatttacagtggcgatgcgaagagattcaaagactttctaaggaaaatatggagacgtggcgcctagaggaccttgaagccgaacgcaaccccgagccaaaggtagcccctccacctaaaccacccccctcaaaatggctgtaccctgagtccgaccccccgtatgactggactacatgcccactggcacgacggtacatgttcatggatcatcctgaaccagacgatatcgctggctttacaggggataacaacgctgcaaaggatatggacacttcgtaagtttctttcatgatgttccgcatgtggccaagtgattcctcatcacctttccatcgcatctgctcgcgcttcaatgtgctttctggtttctactttgcgtttcttttgtatatgtgatacccctagtaagttggcttaaatttatttctaaacaatggttttggttgaacctagtctacgtttaggcctagcagaaatatgggagcgaagaagccatggagctgtagaggttccacggcgaggacaatccattatagacatacatatgtccaaagaggtaccaaactagcaatccggactactagaaagaaatccacggctcttgaaatcttgaatcatcgcaatcatatcaacataactcataaatcatcatgtcagaacagagattccaattaaaaaccatcagtccaactgttcctatcataactcaatcgcccagttcatccatgacatccacgaacatccgagcatctaaacaaacgtccaatcagtcaacaatacccgagactgttgcgtccaaccacttaccagaagagcgcgtgaactccaggatatgataaccttgtgaggtctgcggggggtcgtaatcatcgacagacataaatatgatgggcttgatatcacgcacaatcaccgttttggaaccctgcaacttaagccaactgcgttttccaaggttgtgggtgacgaatgctgtccagacgggtgtgctgtgttcattttcattagaattcattttcgatgtttaattcgtacaattgacgcttgacatactgattcatctcgcctaggtggactgacgcctgcattcttacggctccagtcaccgtgtctttgtatacgcgcagcgcatgcatgtacccatcgtcggtgatcgggctagaagatatcagcctgtctgaactcaattatccttggtatggtgtggattgctcacgctccaaagcgttgctgttcgtgtgtcagctcgtggtctaggatttctcctataggatggcctgcatcctgggagcgcaaggcgaggaatacgttatggaatatcactagatctgaaagataaagctgtaagtatgtcacttcaacagcccaaggcggggttttcagattagcattgctgaccttccaatgtgctgaacttcaacagggtccataaaacaagctctgttccatgattccgccgcctgcacagtcggaggcaagagccatctcgcatgagctcgagtaaattcagcggcaagcagtagtagtcgctaggccccgtccggtggggcttcttgcaaaggatgcggacacgatggtctgttttccttagataaaaggccacacgcatatcggactcgtcgtttaggcatctatactgtgttaaaatgtatgctcaaaggagtaaaatttcgcaacttgcaggtggatgagttcctcatagcccttgtctttaattgattgtttaatgccaggttgagattctccgcagcagcgtgacctattgccaaaatatgttagccaaattctgagaactaaaccaagctatctataactcacttttctctcgaagacggtagaggagtgttggtagtattacacccgaatgtatccttggcccagtgttcttgaataacatccgcgctagtactagcggatgtcgaagtgaacggcgagagcgggatatccgggacagacggcgggaaatccgaagaagtgccggaggaaggcgacattggcggaggagacatatgcgacggccgagcgcgctcgaatgacctccggcgccgtctgttcaggtcaataaccgggcggccactcgtcggacgttccctcaccgggcgctcccttgggaggcgctcccttaccgggctcgggggagtcgctgggcggtggccgataggcgagtcatccgggcggagtgtcatgccttcaaagcgagcagcgaacagaccatcttgtatggagagtaaggccttgaattgattgacgagcatcacgagggttgacgaggtatagtgaccactaacaacgaccaggaataagtacacgcatgcgcttgtctactagttttgcctggcggagcacctactctcttaccaagtcatagaactctttaaaggccgtcttatacttggctaggcgggctgccagggagtagtttgattgatcccaaaagaaccgactcataaatgcccatgtgcgcttgtacatcgctggactagcatctgggccatcaagacgtctgaaaatatcgccgatatcctcaatcgtatatgtgaaactggcttgcaccacggtcaaatcgggtttgatcatttcaaaatagcggcgatttcggggatcttctgctagatgttgcaaagcggacaaggatgagctgatggcgaataactcggacaagagcgccgagatctcgctcatgtgttctgggagagggtctcggaatgtataaaaaccagccgccacgtcgtcggcgctctcacgagacgcgcgcagagcctgagccatattatagtacagggttaggccatatacgggttggtgattttcttgggggaggcgcggagggatctggtggggagggctctctcgaagggggagggggctagggaaaaaattaggaactaaacaataggccaataggctcacatgcgcacaattaacattatttagaaaagacgaaacgaaaaacggaaagaaagccctcgagataagaagcgggaaaagaaaaaatctttgcccatgaggctctcgagacagggttgtcccaggaccgacgtgttcacgcccgaatggcggggcttgtggagtcttggtctcatcgtcatctctttcgcttttctcatagaccgcttgttcacggatgtatggaggatgtagagaatatagagaatggctctgtatactcttataagctcggtataagcttcagttcatagggtcgtcccggccctaaatgcggagaagtggtcaattttatgcttatggctctcagttagaccaatcataggagcgctttggggtaatactccatatggagagggaataaactgtctaacatgagatatgcccgatataactagccccactaggtaaaatacgtggcatacatatgttccagataaactctttcccggtttgcttgcatatgatatcaaagtcagtgaaattaagtaacagaaagccaatcctaccaagttaattggtttccttgaaatctctagataaatgcgcttcttgccggacttctataccccacaaccagaagtctatatataggtaatgtcgagcaagtaccaccgaattacgggtccctgagcgggcttttgcgaggtccgatggtgtcgttaatccccacttcatatccccagtgatttatgccatagcgagttacacattccctggttggaagaaacccgcgaaataccagacaccgctcttcacatacagacgatgctagactctatgaggccgactttaggacactatagacccaacaaatgtcccgctctactagcggatgttatcgttgaattcggcatatgaagaggtatagcttgaggtagcgcgattatcctggacagtcagcccttcgtaaggtgacggagcgctgctggcgaatgcgaggtcttcggcttctttgcctatagacaacattaaaatgaacgcaccgtgtgatcattgcgagtgaataaaagagaaggcacacgagaaacgggcctagtcgatgtttgctgatcgatcaagagtcctagatgggatggttccttccctgctcgaagcagctggggcgaaacatgatagaccagcctaattcagcaggcgagaggccgcgacaactgatgtctaaaaaatggtatctgacagaagtgggagtcagatgcaatcgcgagaaacagttgattttgcgtgtctctaaacgacgaaatattgcagtcaactctcgaaactggtcatggaaggtactctgttacccccaaagaataaaaggaaatatatacccactgaattaatctcaattccaccaaattatacggaaagcgttgatttcgaagttctgggaaagctgtatgaattttacgatcgtttaaaccgatcagccatctggttcacgtaatgatacggtgatgggtagtgaagaaagcttgagcatcaaaacggaagggagaaagccatcgatcgggatcgagagcttaggatcggaggtctcacgaacccaagctgcagatagtgtacatcgtagttttagataccgccttgtgatcgatccaggtggcatttgttcgacttctgcaacatagatttagactctccaatgaaatttccggtcagtaaatgcagaaacattggttggaactcttccagcatctgaaacaaatccaaagttaagcttcgagcttcgagcttcgaccccggattcttagggcggtgaatgacgcaggcggtgagacacgcccgattttgcggggcaaaaaagctcaagagctctggagagctcccgaagcttccccgaagctcgacagccgaagatcagacctaaagtgaggcgaatctgaacgcggcacacaagacccctcgcacaacagactaaatcctgattttgaatcatccccataagctagtgatattgccaagacttgcttgctatttttacaaccattgaaagcttaatggaactggccttgacactaattaaaaaaaggttgagatttcccattgataacttaataccctcgataagagcaaagaggaacagttcagaagcaagtaaaccccagccgtcctccaaacccagaaaccgtgcacgaaaccgtccgaaaaaaacatcaggagaaccattagagaaacacaaacgcccagaggcaaaagacgaagtgaagctagagggcgtttaagaggattcctcctcttcctcctcctcagccttggcgaggtaggcggccttctcctcttcgtagcgcttcttgtcggcggcggccttagcatcgtagggcttgcggtcggtctcgctcagagccttccacttgtcaccgagctgcttgccaacctggcctgtgggggtgttagataagtacaatggagttggggaatcaattcactgaccgaagctgatgccggggttctcctcgcggaccttatcacggttgtcattggcgaagaacatgtaagcggacagaccacgcttgggcgcgttggggtctaagtcaattagtacaagccgttgacgacgaggttacttccatgtcgaacttacccttcttgcggcgctggacgcgcttctcgggggccttgcgggtggtcttggtggtggtctccttaggcatgatgactgtcgaaggttagatgtggtttccgaggattcttggcacaatagataatatgcgggagaaacgaaaggcgcgattgagtcaagtgaaggtttatatgcgcaattgacatgacatttaatgagatcggagtggaggtgggagatgagaagggcagacgcgagtgttggctagacgcgttgcgcgcaaccaaccacttgcgaccgaggcaaaacagagctttgagatgatagggatgagaccaactcacatgaatttgatgatcacaaattaggaatatgttttgaaaagaaaaaggactgtgcgattgcgagttagttgaggtggacaaaaacatagatcgaggtgcagcgcgcgatcgcaaggtcggcgcaaattgggaaaaaaaaagacaggcaatgaggtgaaaataaaggattgcaaggaccaaaagaactgaaaaaaaaagggggtggtggttgtggtggaggaaattcgattgcgaagtgttgatttatagaactcggggtatatgcagtacctttttttgtaaggggagtttttgtatggggagttggtagtgtaggaagatagtaagagaagagaagagtagaggggggagggccgtagtagtagcaaagagaggggggccacagcaagggaaaggcactggtttcgctgactggctgggagaaaacgtatgatcaatacccgtaacttacgccgtccaccatactattcgtcactgatttctggaaatttacgtattatttcccccaggttaccgtcagaatttccatttagatcgtttgctatgatatattcatgtacattccttttttttttttttttttagcaagactttgtgggcggctgtaccgattagaaaattcaatacggcgtccacgggttatgaaacgagaccatcattccggcacttgggacttgtggattgcgctccgtcatattaataaccgcgcaaacgtacaggtacacggtacgcggtaactccatagtggaagtatctgctcggcaagtacctcgtacttgtcattaccgtggagtgtttgccattgatttgatatacatacttcgtacaatatggcttatattgtaacgttatgctaataataaggccgcaatgatgcctacagttgtggcaagtaggctacgatgtatgtcataaagagtccggagaacccctggacgaaggtacaaatagaatcgagcatttccatgtatttaggtcgggcagggtttgttgtgtacaggcatggaatatcatggacttgcttccatagggtatagcgtatagtggctttggtcgcgagtcgcaaggtcatgtgcaggtacatattattattgtacggggtactttgcggttctagaaagacagatcctagtttactacggggtattgtatcattattcccctggtcgatagaataagaattccgaaaacacggtctacttaagctctcggtgtcaatatcattcggttgagaactctgtgtaatgacacaaaccctaatcatcacgcacgcaacgcgtgtctagacgtgtgtacacaacagtgtgagtactcgtaccaagtactcaactatcatcctcaggcaagggcgactgactggtcgctcaatcataatcgttgcgcttccttttagcgtaacctcaattggaaactcggctgggcaggtacttaggaaggggcctgttagacctgttgataaagggcatacgtgttctagaccctaactagcatggatgaatgtggcataatgtggcatagagttatcgctattttcttagtccgagcattatccacgcctagactgataggttacaaagtgagacggtatggcatgggacggcttaaaggttagactccttccttacagagccggatcacaccatcatcacaagctaaatccagcctggatatcttttccaatatgagtagactgcatggatattccatctatggggtaatgtgctccaatccgtcaaatgcctcagattgctcctttaacttgcagataccagactagtacaatattgtagagttggcagacagattaaaagcaaaagtccgtactcgtactgtagacattgtcaagtccaaacgcatagaccacgcatggacattctggtgttccctgaaagaaacccttctttcttacacataccgttgatactgcagtactgtggatgtgtaaggagggctaatccacctgtactccgtaatgtacggagtactctgtacagttccacgccttccgacaggaaagtgtattgtggactccaaattgatatctcatcgctagctaattaaaaagtgatagttatgcaattatccgagcgtagagcccttacttctcagacgcgaccagagtacaccgctgtgtatagccgtcataattgcagtactgatggaacacattgcccaggtgtaataattattatccagtccacattagttattcggctaaaattaccattctctttttttcttcttctagaaacagaaatcaaatgtcccggagacttgggtaatatcgtatagcgcctgtgctccttaagtacatgtacagttgatggtcggaattaagaaatgtagaaaacgggcaagccgcgtcgcaaaaaagaacaaacatcagtcatcactttcatccagcaccaacgcgcgcaacatgtcgtcatcagcccaatttagtccactggcaacaactacagcacttgcgatggacttcatagtttcccactgagctttgcgcgccttgaaatcagtttcagacttgtccaggcgcgataacagctcggggtcttcaagcttctctctccatgatgaatcttctttcgtgagctctagtagctggcgcactagttcctggttttcgcgattgatctggagattctttacttgtaggtttgagagctgcctcatcaccaagtcatgtgccgacgcgaggttctcgtgtgcaagggcaagcacatcgcgacgattcaccagacaaagaatggctctgcgtatctttgttagacttcggtctagtttaagggctcttcatgggtacatacctctcagcaggggttgcagccttcaggtggacagctttgagaataggctcagtcatgaggatggtgcgaacggccttcctcctgactgtataagtagatcgggcctctagaagctcacgttccgcgattgcgagctgttcttcagcatccgcgcccgaatatgattccagttctaatagaacaaaagtgattagaaaggaaaaaaaaaaaattaaggaaaagaaaacaagcatataccttgttcgagaaatgccttttctagctgctgttcctggatctggttgtagagctgcagcaccaaggcctctttatccgatagagtcacgacatcgcgatagtcatctgcagcataatctaatagtgtcacctcaccagattgtaggtgaggcagcgactggccatgttttgcagccatcgatgtagatcccatgaatgcgggcctatctggtgatatgaagatgagaccggaggcggtgggcgagcttccccggccacaggttgcggagcaaccttcaacgtactgaccagcctgaccggggcttcaggactttcattcttttctttctttccttacaggcaggtgtctcctttttgggaaatacttctcacttttctctctactgagcatctaagctcgcctggtgcggaggaaggtaatgtcgttgcacatctacattgctcacaccggggagcatttcctggccgatccagtggcatttgcttcgtatgtctccactatcttcattgctatttatctatgttgatcagatctatctgaactccagctgacgcttgtgcatttctattagtcccgatgctttgaagtcatggatcgttcgaaatacatctattccgccaccacggcagatcttgatgaccgcccggggaaagaatgtcaaaatccaaacgcttgctaccgaggtactatattacgaatatcaatcataacctggaaatcggctaactcataggcaactatcgcagaatgagatctttgtatatgaccgacaatacgtcagtgaaccaggtgacgtcgagtttccggaacgacctcctcctgaaccattccgacccggtagtcccccggctacactgaaagactcgaacgaccttcaggcatggcggaacctatatatggcacggcgcaactgggcgctggacttgtccagccgctgtgggtcgattgataagaacctccgagaacataacgagcgaaccgatgttataaatcgcgcggtgggcgtggccctggagaatctcaagtcgcatgtgggtaacttagagcatcggttccaagaggcgcagacatgggcgaatagccttttagaagagcagcaggccgctttagatggttggcaacgagctctctccacactggataacataccggcacgtaaggatttccctcttcttggacgcccgtccacgcctaaaatggacgaggatcgaccaaccggaacgctgcgcgactttgtcgatgtaggcgaggtccaacgggctggatcagaggcagcaactgtgtcggcggactttgttgctagcgtccatgaaattgaaaaggcaatcggcgacatcgcctcggacactcaacaattagtagaagatgcccttgcctcaaatttcgacggggtggatgggtggctggaagaagtggagactattgcgaagaagatcgagtctgattatgagcatgtcctcggcctgccgaacaaccagaaaacgttggccaatatatcaagacttgcactcagccatacgcaagaccttcttccatcgctagtggagatcagcgtcgagcttcaagctgcgctagagcacgctgtgcaacgccgaggggccgcggagaaagcggccattcagcatatgcgcacgatttcctctcttgagtccagacttgccgacgccaatgcacgaatggtcaatctggacatagggagtaatgcctttgaggttatatactctgtcttccaaatgccaatggtatatgggtcgatccttatcgaatccgtgcggcggcgagaatggagtgagaagattaagactgactccttgacgctggccgaggagatggccattttgagggacgaagagcaacgtcgcagaaaaaagtggttaaagaatatgggggactatatgactgtgactgattccaccacaccgggaatcgaagtcaaccttcaaggtcaggatgaggaatggcccgaagtagcccggaaagagatcgagtattacatcgacgatttaaaaaccactcattccttgaccaacttagcggaagagctcacccagcagctcaaggcgctagatgcaccaactcggcaacaaagacgtcgggccaaagcgttcaaacaaggcagcgtatttgacttgagccggagctctatattacgcgccgatgactccgtccgtagcttacaagaagaaaagacaaagctagaagaaaggatcaaggggtctgacagtcgcgtccgcaaattggaagaccttttgcaccgacagagtcagctcagccggccatcgagcggcactttcggccccgacttccccggttcacctgcatctcctcaccctgatacattctctagacggtcatcaatgtcttcgaggagagtctctgcgactcagtctcccgaagagaaagcacttgtccagcgcattgttacgcttgaagcagagttggcggccgagagagatgcggtccagcgactccataaggaagcccacgccgagcggcaaaccaactccgacaagttccaagaagcccaatccaccaaaaaggatctcataggcaaccttgaagcgcgccagcgtgaatttgaagacgagcgccgatatctggactcagagctaaagaagttcagactccgtactgaggaaatggaagaagagcttgatcgacttatggacagcagagagcatggaaaacaagaacttgacgaccggatgcaccagctcgaagtcgaccttgaacatgctcacgccaattccgccgaggacgcacagaaaatcattgatcttaacgcacagattcaaactcggcaagagcgagaagaaggcctccaggctaagattgataaactcgagcaccaacaaatggagttcgagcaaaagcagcaggaaagttaccaagccctccaagttatcttcatgaacctctcacctgggggtattgtgcctgtcgaaattcccgacctaatcaaagccattgaagttctctccgagggtctgtcgatccacgccaagagtgcggaatcgagtgcatctcaggcaatggccgagagtaaggcccttgaagaacagattgccaaactcgaatcggaggcagaagagcggacgaagagcttcgatgaacgtgaggccgaattgtcgcgactaactacagagctgtcacgcgcgcagtcaaagtcgaatgacttgactagtgaactggacaaagagcgatccaagtacaattccttgcactctcaaattactggagagagtggctccgatgcgctgcgtgaacagatcgccgaagagcaacagaaacaggcagagatgtcgcggaaactggctgaagctgagagtgaagcccgaaatttgaaagatcaggctgcggaatgggagaaaaaatcagggagtccttcggagactgagaaacgggctgtcgcgcggtccgaagctcgaggtactaagtccttcgagctttctagtcagctcttcgcccaggttgagaagctgggtcggatgctcgaacaattggggttcaccatcattcagcaagatggtcagctccttgttcaacgagcttcaaagcttagtgcatcattggccctaggcgaaagcctcgcacagtccggtattgtatccctgaagccggataccgcgctcctagactggatgaaagccgaaagcctggaggatgaagagaaaaaattctcggctttcatggaaagcctagctcagttcgacgtggccctatttggtgatgttgttgtcaaacgcgtcaaggacatcgaactcctagctcgcaaatggcaaaaggaagctcgaggctatcgtgaaaaataccaccgagttcagagcgaggcccatgacaagatcgcctacagatcatttaaagaaggcgatcttgctctcttccttcccacacggaatcaagccattcgctcctgggcagccttcaacgttggcgcgccgcactatttccttcgcgaacaagattcacacaaactacaagctcgagactggcttctcgcccgcatcaccaagatcgaggaacgagttgtagatctgtccaaatcaatgaacggtatcgccccagaccgtcgctccctcggggccgccagcgacgtcacctctctggccgacgagaatccgttcgagctttcagatggcctccgttggtatctcctcgatgctgtagaagagaagcccggtgcgcctgccacaccggggctagcgaagagcacagttgcatcagcgcacgtcgatgccaagggtagcatccgcctcaagcgtgctacggacgagggcgctattgccaaaaccctatctaggagccttgatagccgccgcgagagttcaaattccaagcggggcacgcccgcgccgtcgcagcacgctgcggactccacgaccgatcttgtccgccttgccgaaggtgatgccggcacacagcctcgagaggctgctccgaccttcgacgaggttcgccgtaacctgccctccggcccgtgaaaagtaggacttatttatcttccgacttttccgggtctgttttttatataatttgataccggtactaatcgttttcctttggcttaggatcctgtctctgcatcggctcagccaaacataagtagcaccgcttctttaccctctcggccggcgtctgatcgtcgacacaacggccgatctcgtccgtgggagaaattgtggtctcttgactatcgactcgagggtggcgcaccatagactggttttttatttttatttatttataagctctggcgtactaagacgtggcattgttctttggtttcttttcggttcttcctggacatatacgtgtcccatttgcttttgacattgatttagtccagatacccagcaatgcaatctatacttgaatatattaatctacttgaagtggtatagggcacaagttgccggttgagctttatgaaacgtacgtcaaaatatactcaaacacaaagataatttacatagcaggtaagccgaggttgatgaatgaaaaaaaaaaaaaaaaagaaaagaaaattgaatagttaactagtctcaactggaacccgggtctaatccttccacgccttccatgccacccatgtcatgccaaaattggctgaaatccacgttctcgtcttcaaacatctgcttcgcttgcatcatcgcagaccgttgccgttccacagtgaaaccaccaggccgcgagctctcccattgaattagctcgacccaacgcaggaagagatcctccttgcccatatcggccaacttgtccttgaaggcaaggagttggtcgcgctgaacggagtctttttggctggtgggggtattatcatccccaacacgccagatcaaccaaccgtcagcatcagtgttaaccagcacggcagtgcggaattcatccatcttcacaccatcggttctgcgagtgcgctcaacaagaccatgagcacgaaccatagccgcatagtctaaattccaatcctcgtccacgagcaagtaaccagtcttggcgattcgctcgggagtcaccgcggcgacgatcttatcgcgacgcgcctcgtcgtcgcggatccaccggttgcgctctagctccttgctccaactgcggttactgcggcggacgatgatttctcgctcaaggaaaccgatggcacgacgccagtgcaacggccctctgacgaaattaacaggccacgaccacagcagggacacgaggaagtagtcgacgcatatatttccagtccgccacaggatgattcgtaccgcttctggccacggggtagacgtgtccacagtcatggaatttttgagcccgatcaatgttcccacgagcgctggatacgtactaattcccatgtacacccgtaggccaagtatagcagttactatcaggttgacgataaggggtacggtgaaggtctgtcgtttcagttcctctgctgtggtgtcgatgtgcactaggtatacttcgtccggggagagttgctcgacgaacggttgcaaggcttgcggaactttggtgaatggtgggatcgggcctgaggaggcggagcttggtgtcgaggctccggatgaagatggcgtcttgccgcgacctgaacgccgtgatgattttgccatggcggggttgatagatggatattccactgaattgctggatatgatctgagtttgagtttttctcaaaggcttaattaaaatgtgagtttgctgctttcgtcgaagctcttaaggatgtggcgactaaacgtgtcacatgtcaagataaagtgagggacatttgagcacgacgaggttacaaataatctcctgataaggtcctcagcgtaaatataagtaaagacaagttgaaatggcaagttgtcagtgcttgaagagtcgacgtaatgcggaagaaatccagacggcctaaccacattcgggaatgggagcgtatttacctccgtcatttcttcacggcgcaggagaaccgcgtctttctccttttcccctacctttctacatgtaaatcctctgcaggctgcaaggggtatttcagccatggctctcgatagaaacaatcgagtctcgcaagatagacaaccctcacctttccgacgcgcctcgaaattcgaccatcacgatatacctgcgaaactcccatcaccccctcaagatggtccgcatccacgacacgctattcgcccacgatctctagtcgatgcgtatcgagacgcatcaaaacacgcaatgtccgccacatacgaagaatataactatgtgaccacaccaagcccgcgatcgaagcgacaggcgattaacgcgttatcgccaatatctcagacctctcctcccccccaagaactagaagatgcatataggcgaattgatgaagatgacgccctagccgatctcgtgcgcgactatgactgggagccacaattcagcgcacgccccggaagccgaaatcgccccccgtccccccgagcaaagtacacaaacggcggtcgagcatctgccaatggacgatccatctccgacgctagttttggtgatgacctcggcgatcatcgagcgcgcaagagtagggactataccaaggatgaagagcgcctaaagcgggtcacgggccaacgctcgccggttttcagcagggcgcaggtaggacgggatgccctgacggcagataatctgaggagacgaatggaggataagactgaggtggatcagcagatgctagaggctgacatgaacggtgttccttcgccgaatgtacccagtggttggggtcatcgcgcaggttatcgacaagaatgggagagaaagcctacccagcctagtatctccgaagaggagaaggaaaaagcgcgtcgacgctggtcgccaatgacggaagaaatccaagcccccaggtctacgcatacctcccctcgttctccggcgcgggcactttctgctagaagcgcgcttgaggaacgcactgccaatccgcatatgcaggcaatgcgggaggactacggggaagcgcagtctggcccaaagccgacttcgcctactagcggtggcgagccaattccaaattcccctatcacagtattcaaaaacgcgtcattcgcaaggcccagcctcagcaagcgcgactcccgggatttactacgcaaactctcaaggactgaaacccccaaaattgaacatgtccagactcccgagccactcaaactgtttcaaagcaaagtctatgacaaaacccctcgagtaactggcgcgtggatcgatactcctatgacccagcgggtggctgagaaggtcgagcttcccgaagatctgacgaaagatatcattcctccacgcataacggatgatcctaaggatactgcacctacgaaactcatggaggtcgaatcgaaacccggtgaaccgaagcccgcgcagactagcgaaaaagagcctctttctgaaccactttctggaaagcagtcgaggcccgcgttgccgcgaccccatctacctaaaagtgcattggagacagtcattgaggatgctagctctggcaaagatgtcgaattcggagaagataccatcgagtctcttcaagcatttatggacgggccaggtgaacctaaaatagaggaagacgacgaagcttacgaaaaggccgtcctcgcccagctcgaaaacggcagttcaaaagaaaataatgcaggcaatttggattcattgaatgccaagctcaactctttaatgagacatatcgatgaggtcaagaaagggcttgacggcctggaaaattacgttacacaagacaccgccattgtgtcggaggcaagctccttaaacaagaagagcctccagtcattacacctgcacacaagcgattccggcacaggccgtggtaccactccctctgatggacgggtctacgccgcgatacctctccctcggctgtggacggggagcccacgatcccaacgccttcggccaaccaagctcggctggttcatcattatttcgctctcgtggtatatcatcgaatgtctgatgtgggaccggtatagtcatcccgagatatcagaaagctgcgaaggttactgcctgcagcccgatgcgccttggtatccctgggtaactgtcacgatgttgtggcgctggtcacatctatcgactattttcacgcctatttttgctctctgtgttgctttctctcgactcgtggcgcaattgatgggtctctcggatggctacgtcgacgacgcgccggaacttggaaatatcgttggcgaaatccgcatcaacggaacaccagtcgcgttcccttggctatcagcccccacgcctgagaacattgtgcctcaaccacagcaggtctactatacacagcagcctgtgcaaacgcagcctgtctggtcggttcgggacccgcccccgcagaggtgggacaatgaccagctgttgggggaggatataatggacgatgatgaatatctttagttctcaaggtttcttctaaattccccagagatttgctttgcgcgtttcgctccgaatcatcattttgctcatatgagctggactcgtgtgttatcatgattctaattcgtagtttgagatgctatctaatgtagcgattcattgctataatctctagttaacaaagtaataagtgatatagtcttctggatagccataaacgcccaacacgtgtaagatcgcgcgactggctctccagggctatcgcccatctatcacagaaatggttcgtcacgaggatcattaaaaatacaaatagggtattataaagcaaaaggaaagaagcaaaccatacaaaaccacttacaaccgcgctgtcgcgcgccattgcttctgcaattcgatctctccctccattttacaagcagtcattcgctgcatgagggcctcaacctgctcatcactgacttcacaggccttttcaatcggtatttcctttgtcaactgcagcttgaagcccaaccaggtgaggttcccggttgacacaatccggccagcaacagcatcacggcagaacccagcaaagctctcgaagaaacgatggctagctggcctatccatcatgagtataccgtggcagtgcggcataccctcgaacaattccgcgacgagaggcgcaccggcttggtggacacggcgcgctagaatgagatcttcgtctgtgagaccttcctcgccagtcgagatccagataggcggtgcgttcttccatagatcagccggggtagcgagcggagatactaatgggtggctcagcatgctggcgttgcagtagatgtcagcgcgaggtggggacgtgggccaaacatcgtctggtatgacatggaccggagtagtaaatagagtcttgacagctgggtcgttagggggcgcagccggcgcttcgagataatcgaggtatgcattgccgctggtagatggcatggagcgagacacatcgcaccagggagagatggttgcgacgcctgcgggcagttctataggcacatctttgccgtggaagcggatagtgtgagatgcgcggtcgagggtcaagagtgtttggaggaggaccagtgagaggttcccgccggcggaatccccagcgaatacgatcttgttggctggcacgggtttgtgaagggagcctggaggggggtggaggagtgagaggtatgccgttaaggcgtcgacaagcgcggctgggaatggattttgaggagcaaggcgatatcggacggataagacgggggcgccggtcaagtgggacaggcgtgcgacggggacgcggtggctgcagggatccataaggctttttttttggatgcgttagctatgcgcacggttgtaagagggtcgagcgacactcacaaatacgctcctccgtggaaatacaagatcatcatatcagacggcgattcctggcgcagcttgtggtatttctcctcttctgagagatcgggctccggtgttttctttccaaccccggcgcgataaccggtccattcagcttcgacggcgatagttgcggggatatcgtatgtctcattgtcggtcttgaggtcttcaattgcgcgtattaccgcatcgcgcacgtcgacctcgggctgtgggagggtcactttggacacccacatggggcccttcactccagggtcgcgtatgccttgtctctgggttttaccaagtggagcttttgttgacatgaatgagcgaataatggcgacggttaattcggtgcgcatgtcctgtttccccttgacgggggacatttgaatgccatggaggaggatggtcttgaggattagcgggatgcgcaccagcagcaccttcaagagagcgagagtttccctcagcgagctcatagtgcgaaggtggcaactttgaggactggcttttgcgaaataacgaaaagggaggtgggagagaaagacctcaagatcttaaccttggaagatgctaaactggttttagttcctgagtggcgtcagtgccgaggtccgtggatcattggtacccacaagccctaattctgaattgcttcaatgtgtactccgtatgtagtattgatattcttttcgttgatttatgatatgattgatcattatatatatcatgacggctttgctttagtgtacttcatctgacttaccagtaggttgccaagctaccagattatgccggttatgacctgcatcacatgtacctaggtagcattactctgaacatatgatattgcagcattaagctgtggaaaaaaaacgcttataacaaccacaagacttgacatcgcgtggtaaatgggcatacaatgccgtcgtcgtcccttattagagtaccaccccaaccaagtatgtagttctgtggcttcatatccgatgacaacagccgggatatttctaacacgatatcagaacgtgaacgccctcatattcctaggaatatcatattcaatcatacagcattgatctagcagatgtaagaccagaaccaatcggctgccctaatccggacttgtgatagatgactaatcataagcctcaggccaacattttcatgatcttcaactctaaaactaccatttgtttcaggccctttggtttttgatgtcttcactttgcacgcctcaaggcgaagcttctccgcctttgtactgtatgttttactgagcagaatctatcttgtggatgcaatctttcatgtccgctttccccatcgtcccattctcatccccccactcacccactactcaatttgccccatcgcctcgggacgtgttcatggtagtaagtcgggcggacacgactcaataacttgagagatggaggagagtacccttttcggcgacgacttgccgcttccaccggctcgacttttcgaacgattaggtcagttacctggctatacctgggatcagacgatcgaaccgtttcactcgacatacaatcactggcatatctcaggataccgtcatgccctggagccggatgttttaactcctcttgcaaattcctccaatcccgcttcctccggaccgtccagtctcacacgcttctccccgcgcacagaagctcgaccatctgcccgtgccttgcgaagattgagcgttagcgaaaccagcagtgaaatctcattatccaaccaacacagcctggagacagatcaaacatggttaccggtcatcgcacgaatctccacgaacattatccggctcgaacgagagtttcacatgcttaggtcaattgtacaatcgtcagatccggattgcaatcatacaatacgaccagtcgacttgatcaggctacaacccgatgacgggcactcgaagacgctgctggttgcgatttttgagtctccaggccatgataggttgcgagatctggtcacattcggccctgcctcatttgccgcagggtccaaaggtgaagacaacaatgtcacccccagcgagcaggtctccttacaagccttttttgatttcgcaattggagcatgcgattgcttggagattctacactatggcctgaagacagtgcacggcgaaatcagaggcgatgcgttccatttttgtgcagagaccggtgcagtgaagctcgcgaacaccggaaacggtgctaggtcgtttgataacgttctcagcgagggctggtcctccgtttcgcgcgagcttggggccaagtacaagctgcaatttattgccccagagcagactggaaggatgcctacagagccagatagccgcactgatatttatgcgctgggcctctttttctggtccatgctggttggaagactaccatttgaaggaaccgatcctgttgatgtggtacaaaatgtactaggcaagagattggtaccagtatctgggaaacgaatggatgttccagatgctctctcggctgtgatccaaaaaatgacccaaaaggtggttcatgatcgctaccacacaatctcatctgtgaagagagacttgaccaatattgctaaattgctcggtgatggtgacagtgaagcattgagcaatttccaagtcgcgcaaggagacgtgtcttcctttttcactctcccaacgtacatgttcggacggcaagaagaatatgacaagattatcagtatcatcgaaaaggtgaataagcgtcaggcggctgccttggctaaatctggaacccaaagtcccggtactacgcacgctctcacgtcggcttcgtctctctctgaaagccgtatcgaaagcctcgagtttgcttctgtctctagcgattctggctccttccatatgccccctcgatcttcttcgaacgtcaccagttatcatatcgcacaggtaaacagtcatgaatctgtgccaggtagtgagacgtcgttctccactcagaagcatacaattgtccccgaggtgtatagtcaaagcccaggagcagcttccagcagagtcaagagcccatcgcattctcggtcttcccataatacagaccgcgatagtcaccactccatcggtcctcccagccaacaatcaacaaaccataccgttagtcaaccgggatcactgcattccttgaataaaccgaagaatagtgggaagtctcgccgcaacgagcgttgtgaagtgattacaattagcggtccctctgggattggaaaaacggaccttttaaatcggatacagccaacagttcgcaagatcggatgcatagcaatcactcgtcttgaccgagccaaacgtgtcccatttgaacctttcgcaaaactattggccagtcttttgcgccaaatcttctccgagcgcgatgtcaccacagattatcacaacagtgttagaatagccctgcgaccaatgtggcctactctgcacagagttttggatcttcccgatcagctgatgtcccctggcgcaaaatacagaccagctgaaaaggccaataactttctcatgccaactaagggtgagccatccaagcatgtcaacatccccgggctggatcaagggcagacttctcaagatttctttttggcaaatgccgcctcgaagaatatgcggctcacggagacattccttgagatattgcgaacgctgtgtcatttcaaactcatcactatttgccttgatgatctcgaacatgcagatgacgaaactttggacttggtaatgaaaattatcaaagcaaagctaccatgtgtcctcatactgtcaagccgcaaggaagagattccatctgcccaggtgaggtctttatttgtggaagatttaccggcgatcacgcgaatcgtacttgaccccctcgaagagcagcatgtcatggaacttgtagcagcgacaatgcaccagaaacccgatcaaacattgacgccactatgtgcggtcgttcaggagaagagccgaggaaatcccttctacgttcgggtaatgcttgaaacttgttacagaacaaactgtatttggtattcatggaaggactcaaagtggctattcgacctcgaccgaatatttacggagtttgtggctcctgtctatggcgaagggcttggacttggatttctcaccaagcgtcttcaggatattccccaagccgctcgatcaatcatggtctggggagctcttctgggcagcccgttctctttttctctggtacaaaagctcttgacaagtgaatttctgtattcgagcaatgacgacgactattatgatctcacatcaccccaagatatcacacttatcagacaatcagaaggtgatatagttgttgggttgcagtttttggttcaagcaaacctcttaaacacgggaaggaccgacgatgagtttaggtgaggcatctatgtttactactagcaaaaactcttactgattctcctaggttcggcaatgaacgacttgcacaggctgctctttctttgaacgagagtcgaaatgtagagaagatgcatttcatcgtttcacaagtgctgatgaaatattaccatgaccatcgcagtcgctattcgatggctcatcatgtggcacttgcgtcgcggactatcaagtctcgtgtcagcagacgccttgaatatcgtcagatcttatgggatgccgggcaaaccgctttccagtctggcgcgcggccctctgcactttggtacttccgccattgcatcgctttacttcaggatgatatgtggaatgatctcaaacccgacgtttattacgatgaaaccatgcggctatttatcacgacctcggaaatgtcatcctctcaaggtcacaatgatgatgccctccagttgatcaacgaggtgtttgttcatggcaaggacgccttaagcaagtcgagagcctggaccattaaggccaaaatcttcgctcagataggcgatcaccacagctcgatggattcacttctcacctgccttgatgagcttggtgtgcatcttcgtcaacctacaacgtatgaggagtgcgacgctgcctatcttcgtctcaagtcctatctcgagactgccgacctgagctctattgcccaaaagccagtttccaaggacccaactatagtgactatcggcgcagtcatggcggaggcgatgacagtcacgtactgggacgatgcattgacattctatcgaatggcgcttgaagtgatgaacattcatattttcaagggtggattcacacagatcgcaataggttgttcccatcttgccatgatcgcattaggtcgctttaaagatatcgaatttggcacaagacttagcgacctttccctagaactgctcgagctctgccccgaattgtcgactcagagcagaggctcgatcgttcataatctctacgtcagccatttacgtgttcccatggcatcaacactaccggccttggaagcttctctcgaggcttctttctcgatgggtgacccgtatcttaccctgatcagcatctcatcaatggccatgactcgattgtacctaggccaagacatggcacagctagaagctttctgtgtggagacccctgccgaaattcccaagtggcaccaagatacccgcggtggggctagtctcattgcagtccagcaagtttcacgtgccctgcaaggcaagaccgaattccgatctgccgatggtatcatgtcagacgccaatcacaacacctctgactatatgatgcatctggatgttcactccagtaacgctgacaggccccgtgacatctactggggtcttgccatggttccactgttcctgttcggtcaccacaccagagcaatccaagtaggtactcaacttttgttcaccaggcacaggctctggtctgcacgtgtgtcctacgtgatttgtttctatctggcagcctcaatcctcacttttcataatgacaatccctcccaaggatacctcgacgacaagatggacgcactcatggaatacaaggccgagatcgattttgctcgagatgcatcggaaacaaattatggcatgtgggctctaattctagaggccctgatcgccgaggttcggaatgatcatagcgctgccatccagggcttcgagtctgcaatcgaccactgtcaaatccatggttggccccttgaggaagccttggccctcgagctgcagggtgagtttttggttagacgcggagcaaagagggcggctcgtgctgtaattcaagatgccatcgcttcatggagctccattggcgccagtggcaaatcatcgcagctcgctgagaaacatgaatggttactcaagacggccacatcgtccaaaactgtggacgttggctgtcagactgttgattcacttcttgagatcagccgtgatgttgtgcaagaagagtgtatggtcccccagcagatggaagaggatgagaggagacaacaatggatcgagcaaaacggtgttgctgctggggaacgatctctagacatatcaagtgtcgggttagacattattgacttatccagtattctggagtccagtcaagtcatgtcatctgagcttcaaattgacaagcttttcacgaaaatgcttgagatcatcttggagtcttgcaacggttctgatttcgccatcattgctactgacttcgatgataacaatggctttgcaattgccgcagcaggtgattctgaaaagggccagaaatcattcccaggtggtctccctttctcggaaatggaagatcgaatggccttgcatatctcggactatgtcatgcgcacaaaggaagaagttcttgttcacaacgttctcgaagatgaacgattctcaaacgtcagcgagacctacctggcaaatttccccgcgggtcggtctgttatcgcattgccagtcgtgcaaggagatcgccttctcggcgtcattcatctggaaggaaaaccaaattggttcacgcagcgaaacgttgtggtcctgcatttgctttgcaaccaaattggtatttcgttgtccaacgcgttgctcttccgtgaaattcgcaaggtcagcgccaagaatgcttccatgattgaatctcaaaagcgtgcattggcattggcacgtgaggctgaacagaaggcaaagaatgcggaggccgaagccaagcacaacgtgaagttaaaggaagacgcagcaagggccaagtcgattttccttgccaacatttcccatgatctgcgtactcctatgaacggcgtgattgggttgtcggagctcctcaagggcacttaccttgacactgagcaagatgaatacgtcgaatcaattcgtgtgtgtgctgataccttgctcaccctcatcaacgacattctcgatttctcgaagctcgaggccggaaaaatgaagatctccacggttccactcaatttaaagcaaactatatcagaagtcatccgggctttgcgatacacacatcgtgacagaggcctagaaaccatcgagaatcttgataaggtaccaccagagctcgttgttcttggcgaccctgttcgtctccaccagattttcatgaacctcctcagcaacagttacaagttcacccctgccggatcagttacggttaaagcaagggttgcgcgtgagggtaaaggtcgggttcgccttgaatgttctgtcaccgacaccggtatcggtattccagacgaacagaaagctcgccttttccgaccattttcacaggccgatgcatccacggaaagatcatatggcggtagtggccttggcctgtcaatctgcaaagctataattgaagatgttctcggtggagctatctggcttgaatcgaaatctggagttggaacgaccgtgacattccacttggtcttcaacaaagcaccaaagaagacggcggtcaagactgcatggtcacaagatctggaaaatgcagacaaagaactacgtcggtcctcagctcgcgatctcacgcaaatccctcgtgaccagattcgagtgtgcattgccgaagacaatccaatcaaccagaagatcgccgtgaaattcgtcaccggacttggtctccagtgtaacgcatacagcgacggcaaacaagctgtcgatgctctgcgtgcaagctccaaagaaggcaatccattccacgtggtcctcatggacgtgatgatgcccactcttgacggatataacgcgacccgcgagctgcgccgggatcccgatccaaatgtaaatgaagtgctagtcatcgccatgactgcaagtgccatcgaaggcgatcgcgagaaatgcctagaggctggcatgaacaattatctccctaaaccggtccgctcgccgattttgagcgaattattggacaggtatctcgccccaatgccgccatcctatcccaagtctcgtcttgctatccgagaaaagcgttcaaaagcaagtattgacggcagcgccggcacacccaccagttactcctcttcggcttcagatgagccgaagccgttgtcactggaaaagaaatgagtccatgcattttaaatttatacccaagttcgcaaagatagaagttaggcgtcatttgggtcgatgagtttatctctctttgactttttgttttttgcctcgtcgttcaatgcattggtatttcctcctttggtatttcttgtggactttattttatgataatcatgcacctttgtttcccgctcataatcatggtcaatggcatacttcattggatatgatccgatacatattctgaattggacatttgaacataatgcattatttacgtgtagaacatcagctatatacataattctcatgatatcagacaaaagcctaagcgcgacgaccaaagacgcggaaacgcttgacaccgccatcaggaacaagagtcagcttgacgtggctgaacacccgagtatcctcaccaccagcagtgagatcatcggacccaaagacatgctcggtgtctgcctggcagcgcttatcacccttgacgatctcaacccagttggcatcatcagccgagggcacaccttcaccagcagtgccagcaaccagaccgtgcacgcgcacagcgcgagggaagtttccacggaaatccttggtgtcaacaacaaccttggagaccgagccaggaaggcccagcttagcaataacccaatcgacgtgaccagcagcgcgcgagcgagcagtctcccatccgtcacccatatccttgccgcgaccaggaagcagaatgttagatgagggtgtatagtgctcgtcggaggcagcaagagtcacaccgccattgagagcagacgagagctcttcaacgggggcagaggcagaggcagccggggcgggagggggaatggcgtggccgtagaggcggagacgggcgaagccaccgtcagggtacatcagaagacggaagtgggtgtagggggattggctgatctcgtcggataacttccatgcgcggcgctgggagggaccgcaaggtgaagcgggtagtagtgtcttccagccggcgaagctggggtctgcaatctgggcatctgtaatgccgctaccttccggtgcgtaagtagcttgtagctcggccttctcgccgtagttgccgacgaagaatgcggtgtctacttcgacgccgtggatagaggctgcggcaacgcccagcttgatcacggcccagtcgtagggatccgggttatggcggcgggtctcccagccatcgtaccaggcaccggtatgaatgaagacgccggggcgtgagatggcgggagtgggagttaggaggttatcaactgaagcgaagtagtcgtttgagcaggccaggaccttgctgtttaggttgcacgaggccaagttggtagtgtgtgcgaacacctggtcgatatcggcggcggcgacctgcattttgggtagagatttatggattatgcgtttcaatgaggtgtttaattgagaagtcgaagacgagggtgagtgtatacttaaatagcagagtggggggttatcgataagagccttgcccctcgaaatgcatttccattactcgatagtctccattcctcttcggtcttcgtctcatcagagccaatcagagcctatctttctcgatattccgttggagtaccgatatttggcgctaagtccagatccaattccggtttgagacctttcggagttgatttcggagttcgatcgttgatccactacatcaaacgccatatcggaggtctccgatgggcgccgttatctgaatggaagtctctcattgactagaaattatagtcacagaatccatagaaaccggaggaatggaagatgttcaatttgcgcctactgcgtctaccgtggcagtgagaagttgaaagaactttcctccgcgacctgcacagagagcccggagttcatcggaattcaacaattcggccaatgagacttgcaattggttctgctgtgctcagtcaccgacgacaataggacaatagccgccctgcttgtaaattagcagacggaagcaaaaggaacgggaatcaagtcaactgccatcgtgtacagggttctacaatgacacagctaccaccgattcccatatatcccgaacatctttgttcaaaggggacacccgagtcattttacttcgttactgttgcaatcttgaccgacctacttgtgtgacactcaacgaattctccctcgagtcagagattcagggttaaaatcaggtaatcaatttattgccttcagacaaagcccacaaataggcaagacggatcacgtgctatgaaacatgaaatattacccaggtcattcccaggctatgagagcagatatcagagttaaaaattgacaaagtatttcagcacaagcacatcaaaataagctatgaagcttctagaccaacgccagcaatgccttcgtatcattcaatatgatgggcgcaaacagcaaaagaaaaggaaaaagaagagaagaaaagacatttttgtcgctatcccttcccagtggtcttcgttgcagcattctccagggccgtatatctccactcgtactgtgccattgctcttttgtcgcttgcagaacggccttcgttcttgccactcaaatcctttgtgccctgcatctgtatttcccatcccttgaggattcgagcctgggcttccgcgatcgaagtcaggtttgagttttgtgaagccattcgttcgtcaatcgtggcatggtacgacaatttggcgcggaagagggccatttcgcattcgtcgtacttgatccctttcgcctcgggcaccatgttgtcttgtgtactcttcggaggcatctcggactggaccacgagagaaaaagggaaagagggaaatattgtcggtgcagcagataaactacttttatagccgtgttttggtaatggaatgtgttgggagtttggataagtaaagacaacggttttatgttcaaaggaacgaagtatgtatatctgtccaaacacaaagcgaatgattcaagagcgatgtcacgcctagaatacacctgaagcaaacatagaaatatagtggcgaaagggaaggttccaaattaaagagctgtaggggaaaatgcaagagaaatctcgatcaaatatatcatgaccaggtcgtgttcaccgtcactgtcgaaaggaaacatggaccctccaatacccgacatgacggatgtatcacactcaattcccccaacgctgcgcagaaaaggggcatggctacggtcaaacccggaaagagaaggagatcaaaggacacatgcacatacacacataagagacttctaacaagcccaacggtttcttcacgccaaaaatggttatttgtgcctctgaaaccgtactcgaagtaggccctacccatcccgtgttgagcggcgatgacccgtttgcttttggcaacagtgccatctgtctcgtgatgagaagccgagccaatcgatctaagttgccgccttacctggagcgttgggtgcaggagccatggtaacaccatgtttgaatcgtgcatgactttaggaattttgctagaacggtcgagcatcaatcggcagatgcagtcccgtctcggtccgtatggccgtgcgcacatctctgtgtatcaggatctgtagattggaagacatccgtgtctttttcagttgtactccgtacatttacatgttctttgatggcccaatggctatatgataggtggctgtttgtaccaaacaatccgacccggatcttttcagctgagagacaatcgaaaaagcctaccgcttctataccgatgccacgagggtcaattagaggcaagcaaccggattacacgcggaatagagttgatgtagcctgcccgtcatttccaccctgtcgtctctctcctccattatctttcagaagatctcaatatggaccattgttcgggtttcaatgtagagaagatgggaagagaaaccccctcgaggtcattggtatcaatgcagtgtttggcccagactataaataattagcaattcgcaagcaccattggcttttctactctacaatcagagacatacatacatcttcagtacaaaggataaaaaagaaaaatgcaaggccccatgaacccgttgaactatattcttcagccacgtagtctcttttgtcccttttctggcttgcgtcaccatccaattcttccaaggataaccatattagggctgcagagcacccacaccggctcatttgtgacacttgagaccgcaggaagcccgttgaccatttattttattttcttaacaaagcacatgatattatttgaaggctgaacccattgatcaggatagcctcccttctagagtgggctaaaaaagggacggagtgcaaaagggtcataactcggtacctgatttgtttgtacaacgctgcaggctgaaatttaggggacctatgggccgtgattgcattctggactggtggcgatgcatctcggagaaaagaaaagtattccgtgaggtatcccaacgggaaatgggccagaccgagaaaggtctgggcacttagggctcgtgagatcatctgatatcaaccaattgtagatctacaccacggacattgaagccaacactatccttttgggagtcggtaaggatacaaagcatctcaaagctcatgtttctggtgtctcatgtacgtttgagacgatagagggcggaaattgtgtaacggaacaagcacccctccggcgggtaggcacagggttatatcgggtccgacgcgtttcaaccgttccacattggtgcctttgtcttgatctatgtgtaatattgagagaggtctgaagtttgtttagattcgtcattgattgatttcaagatgaccagctctaaattttcactctaaatccagagagcttggagctagaacaaagacgggaaaggcacatcaaaatatattatccctttaataataaaaatggcttccctactactgaatgtttatcgattagcactgccctcctcattccggctcgccgccgctctcactttcttggccttctgaatatccaacgacatcttcactgggtggactcccggggtctcaaacaccgtgttgatctcctccagagacaaacggctagtctctgggaagaataaccacgacaagacgagttggatcgagttatacacgatgtagacgacccaaatcttataccccactttttggataccgacaccaattccgtaagtctgcgcggctccggcacctccttgaataagaccgtaaagacccattcccttggcacgaaggggtaaagagagaatttcaatggggtacaggttgtgcatggttgcaacaaatgtcgctgagaaggtctggtataggaaaatccagagaatggtgagcgcagccgctgctgtagtggcatggagactgtactgccacgaagtgatcgtcgtggccgtttggaaaacaatcatgctgataagacccacaaagatcatggttcgtctgcggaacttatcgactataagcgcgccagcggccgtaaagacgaaatagactgcggtggtaccgatgttgataccgagtagctgcttctcgctcttgatgccgagttgttgtaacgaaggaaccatctaaaaaggtattagtgactgagttaaggtggcctctgatctaaacacccacatagtatgtgataataccacctccattccattgctggaagagcgagtataaaaacaaaaccagcagtcggaaacgggccgccttggtgaagaaaacccgatagtcccaggcggccctgtagcccgtctggtcgttctcgagagattcctcaatctgtctcaccacaatgtcgacaattggctcatgtatgtcggtgctagtggtgtggtacttggcgatgacttccttggccttctgacgattgcccctcaagatataataacggggcgactcgggagttataaggtatattcccagacagacaatagtggggaataaagcctcaagaatgagaggaacacgccaggagttgttgccaggcaactcggtcagtccaatcatggcaccaagcatagcaagactaccgacctggaagcatgcgccaaaaaagcccaccataacaccacgcaggtgaataggcgagatctcgccaatatactgagagcttgacatgagcgaagtgccaaagcccatgaagaatcggccggccatgaatattggcaggttcgttgcgaggccttgcatgagagatgcaaagatgacaatggcatttccggtaaaattgattccacgacgaccgatcacgtccgccaaacccataaagggtgctccacagacgacaccaatctgcatcagagcattgatcaagccatatgtgccaccactgctcccaaaaccgaagtaaccgtgccattgatccaaagcattaataccgctgatgacaccccagtcgataccaaagccagcttggttacaaccatgaataaacatgatgaggcccagacggactccggtccacgatcggaggctcagagaatcctcagacagcttccacaggtcctcctctgtcactcgtgccagaacaatctcctcaatatgttcccgattctcgcccttgcccagcttagcctccgcatagccagcatctgaggccattgttgcgttttggggaactcgattgaaggaacttgaaagagtatggatatgatcggcccagtatggggttgagaacccttgagctatcaaattcgagccaattttgtggatatgccggggtattattgcttcggtgagtcgatcgcgaagccaggggcgacaaagtaatggtcggcatccataatgttgctaagcgacctatttcgccacggagaagacatgagcttcgccagattaacttgtggcgtgatgtaactgctagaatagatagtgattggtgagtgatggatgtcacgttgtacattttgtacgccgactcctgaaaagcctctcctcgccatgtaccctagggatttcccaccagtgagacacgagtgcgggggagactagcatcaagttggcaggagtatcgcttaaacattttcgcaatgttagtctggagtggtcgcatcgaccgcagatcacaaggacgatgataatctgggggagacatttagcctgaaatccggggaacggccggggaaagagttagatccggcgcttgttttcccgaatcctttgcacttggcaagtcgtatcggcttcttgactatcccactagctcctagctcttttgacttatccgattcagcgtctttcagcatgttctattcaaaagtggcggctgacggaccgaactgccgtcttgttctccagagctagtccatattgatacatccacccaacacagaccagaccagacccattgaaaatcattgaacatgtccgaactatggtaccaacagcctgcggaagactggaattccgccctgcctgtcgggaatgggcgcctaggcgccatggtgtatggacgcaccgacaccgaaatgctacagctcaatgaggattcagtgtggtatggaggaccccaagatcgcaatccacaagacgcgctcaagtacttgccgcgcctgagagaggctatacgtgcggaaaaccatgtcgaagccgaaaagatcgccaagctggcgtttttcgctaacccgatcagccagcggaactatgagccgctgggaaacctgtttttggatttgggacatgatcctagccgtgttacaggctatcggcgctcactggatctcgaaagtgctacagcacatgtcggctatgagtaccaaggtgttcgcttcaaacgtgaagtcttcgccagctacccggatgatgtgcttgcaatcagattgcgctcgtcgagcaaggctgagttcgtcgttcgcttgacgcgtatgagtgacttggaatatgaaacaaatgagtggcttgacgatgtcagtgctagcagagactccattaccatgcatgtcacgcctgggggcaggaacagtaatcgagcgtgctgcgtcgtgtcagttcgttgctatggtgatgagagtacaattaccaagattggaaataatctggttgtaaactctggtgataccctgctggtcattgcggcgcagactacatttcgacacaaagacattgatcaaagaaccaagcaagatgcagagaatgccttgggtctctcgttggaggatctccgctcccgtcatgtttccgactaccagtctttgtacgaccgaatgggattacaacttgggccgagctctcctgaggtcccaaccgaccaacgtctgaaatattctcgggatccagggctcatagcactctatcacaactataatcgctatctcctgatatcatgtagtcgggatgtacacaaatcgcttcctgcaaacctccagggtatctggaacccatccttccatccggcatggggctccaggttcactactaatgtcaatctccaaatgaactactggtctgcgaatgtgtgtaacctctcggaatgtgagcttcctctgtttcaattactagagcgcatggttgagcctggcaaagccacagctcggatcatgtacgggtgtcggggatggacagcccattccaacactgatatatgggccgatacagctcccgttgatcgatggatgccggcaagtatctggccgctcggtggtgcgtggctctgctaccacatttgggaccatttccaatatacatgcgatgaagagttccttcgtcggatgtttcccaccctgcgtgggtgcgtggagtttctcctcgacttcctgatccaagacaccaatggcgtatatcttgtcactagtccgtctgcttctccagaaaactcattctacgattccaaaggggaaaagggcacattgtgcgaaggatcaacaatcgatatccaaatcattgctgctattctggatgccttcgaatcatgcgcaaagagacttggtctcgaggatgcccttcttccatcagtccaagctacaaagtcccgccttccgccaatgaagatttcccctgcagggtatctacaggaatgggccgctgactatgccgaggtcgaatccggacaccgtcacatgtcccatctatgggccctataccccgggaatgcaatcacaccttcacgaacccctcagctggcagaagcgtgcggggaagttatacgtcgacgcgcagaacatggtggcggccatactggctggagtcgtgcgtggctgctcaacctgcacgcacgcttacttgaagccgaagaatgcagtgggcatctagacttgcttttgtcacggtctacttggcccaatctactagatagccaccctccattccagattgatggaaactttggtggtggggctggcattatcgaaatgctggtccaatcccatgagcctggggtaattcgcatccttccagcgtgtccgagaggctggactggatccatccggggagtgcgggcacgcggtgggtttgagttgaaatttaatttcaagaatggccgtgttgtaggtgaagtgactatatattcggagcgtggagagactgtagttgttcacttcaatgagttacaagtagagattactggtggtggtgagcataagatctaaacatgatagatgtgtcaatcaatagatgtcaattgccaattatatgaaaaagacatgcttattcttcaatatcttaaggtacttccgtactccaggtgttggcctcttccccaccgtcgcctatacccacttcgtctaacccctgcacttcctaaaccgtcacggagcaaatacccgcatctcccagtctcggggtaaattgaagagaacaatagcactttatccggatcttcttttgtgggcctcttcgatgagagctctaagctaagaaaataaattatcaacttgttcataattccgccagtcctaacataggcaacacagcaagatggatttgaactcagtgcaagatctcaaggacgtgctccgacccgacttcttccatggctacgccacagcagcagcccaaatagaaggcgcctggaacaaggacggcaaaggcgtgtccatatgggatacattcggccacacgccagacaaaatcgcagatggaagcacagccgacgacgctgtccgagcttacgatttttatcgtgaagatgtagcgctcatgaaatcctacggcgtaaacgcctaccgcttctccctatcctggccccgtatcatccccctcggcggccgcgacgaccccgtcaacgagcaaggtatcaaattctactccgatcttatcgacgaactcctccgcaatggaatcacccccttcataaccttattccactgggatatcccccaggccttggaagatcggtacggcggcatgctgaatcaggacgcctacacgccggactttatgcactatgcccgcgtctgcttcgagcgctttggcgaccgcgtcaaacactggatcacctacaacgagccgggcgtctataccctcgccgggtatgcagcgggcgtgcacgcgccgggcagatcgtccttccgtgagcgcaatgccgatggcgactcgtctaccgagccgttcaccgtcgcgcacactgagctcgtctcgcacggccatgtcgtgcgcttgtaccgggaagagttccagccccagcagaagggaagcattggtattaccctgcatggcaattggtccgaggcgtgggatgaagaggacccgcgcgaccaagaggctgcagagcgtgcgcgcgagtttgagatcgcttggtttgcggatccgttgtacaaaacgggtgattatcctgcctcgatgcaggcgcagcttggtgatcggttgccgaggttcacggaggaggaatcgaagcttgtgtttgggagctcggatttttatggcatgaatagctacacgactttcttcgtgaagcatacgacatctccgcctgacattaatgaccacaagggaaatgtggaaatctgcgatgagaataagcaaggtgtgtctcgtggagaggaaagtgataccccgtggctgcgggccgcgcccgggggattcaggaagttgttgaactggatctataaacgttatcagatgcctatttatgtcactgaaaacggtaccaccgccaagggtgagactgcacccatgcctgaggttcttaatgacgagttccgcatcaagttcttcgagggttatgtcggcaatgcgttggcgcgggctgtgaaggaagacggagttgatatccggtcttactttgcctggacattcactgataactggggtaagtagtggctggtttcttcgcatgaatatggaattggctaatactttcagaatgggccgctgggtatgcggatcgcttcggttctacatttatcgatttcgagtccgaagaaaagactcggtatcccaagcagtctgcctattatctggacaagttgttcaagcatctgattaaagacgcatagaatattgggagacagacaaatagttaacataaatgaagtgtctgtcatatatatatttgcggtaaacgcagcaacaccaccacctatataggcaatagatatatatcgtaagacaagtcatacatcggggtggactggagattactgtgtcaccaccaacatcctgtataacaccatcgcgtaaagcttctatttgttggaatctcgaattatagccagttagggcaagtcattgcgatccttatcagctagaccccgaattactccaactgaggggaactccgcctcggctgttgatattcctcttaaatagctggagatagccctgatagccttgactttgactatctgtatagttacctgcattgtgcatactcaacatgcagcccaaagatgagccaatcaagctgaagctccagggatctcctcgagaagtaaattctgccaatattaacatctgcatatgataactaagaacctcaactgactcaattaaattagatcgggctacagcatggccgagggttacgggaccaaatccacagccagatatctatctacgatgccatgttccagcatacctcaaatctagcctggaaagatgtgcgcgaagtcgcaactgaatttcagcccacacttcagaacctaacgcctgatctgtttacggagatggagggtatcgcagagggcgccgggttagatgtgcttgacataattgcgctgaactgccgaagcgagatagcgctaggacgattctccgatggctgcacggcactaagctggaagaaaagcgaggcgacgcgagtgctcgcgcagaattgggactggacgcagactgtcaagaagaatctagcgatggtatcgattgagcaggttggaaaacccactatctatatggttaccgaggtcagtattcctgtataggtctatattctgacatgtaattaactattctcaggcaggaatcgttggcaagataggattcaataccagcggcgttggaacttgtctcaatgcaatccgcgccaaaccgatgattagcagcaagatcccgatccacgttgcgcttcggttgtgtttggaaagtacttctgtcgacaacgccgtgaagaccatcgagtctctgggtggtgtcgcctctgctcagcatatcctttgtgcagacagtaccaaagccctagggcttgagctgtcgccagttggagacaaacatatctccgaggatgcatcggggattatcggccataccaatcatttccttgagaaccgctatgtgaatgagccaccgtggctgtccgggtcacctatccggctcaagcggctaggagagttgacgcaggagttaatacagggtggtgtccagggcgacactattaccccggctgtgttgcgagaatatgtcttctctgatacgtataaccagcctcagtcaatatgttgtcaggaggacccatcgcgtcatatctcaaataggagtagtactttgttcaacattattatgaacttggacctggagaatctcggcgcagaggtggtctttggccggattgggtctggagaggaagggcctgtgttgacaatgccttggtgaatgaatatcatgaaagaccgctggataggactttgtatctgtgtcttagatcataaagaagatgacaagtctttgtgctggaatccttttattagatatcaatattcatctgtgtttagaatacaaagaatatgaggatagtctttgttacattgtttctctttgaccatggactcaaccataaaagaggcctcatataccaccttcagatgtctcatcatccaccagctactcattcttcaggcaatcggctcaaaggtcataggcccaggtaagcctcataatccactctattcaataccatctagttcctaccagagtcatgtccggtcgcagtttccacggtacgtacgaagaagagcgccgctacttcatgaccacactgcacgctcagattgacattctcaaggacaactacaagggaagccgacatatcgttatcaagtctttgaatcttctccttctgcgagtcgaaggtctgcgaatgtccggacaagctcattttgaccacgataactctagttggacagtcaaatgtaacaggctctatgaacgggtgcagtatttcagggatactcttgtcaaggaccggaacagcacccgcaaagttgccaatgaaatcgagagtatgatgatatttttggacttttgtgtccccgcggatattcaatacaggattatgccagatcgaggggatcgaagtggtgccccatcgcccgagcctatgtgttgattgtatttagatcaatgaagtgattcagttggaattcgttgccgataatggtatatgtagtatcatagtaaaatggcgtacttatgagatttgtaatataggccaagcctagatatttcttttgccgaatcagctttgcaatggaatccctctcactggcgttttcagctcccggagatatgcggaccctatctcaaacgtcatcgaaagtgacgatcacgccaatttgtgatttgtagagaacattgagctgaaaaaacgcaataaacgcaaggatcattggccaccgccctcaatccctttctttgggtaatcttttcgccttttcttatgagcatctcctataactgccatggcctcggcaacaggaacccctcaagctcacccagtgacaattgaatcgcgagaggatgagcctctattgggccgtccaggcgatgtcacacaaaaggccgaggaggccatttatcggaaccttttcacaggtgagcgtgaaagctttcgatcgaaacccacgactgactccaaaatcaggaacagcaagtgttgcgcaagcagggatttggattgtaagagcattatgacctattcgaaaagatcagagaactaatgaacaaaacagctagccgcgttggtctggcaaggtgtcttagcccaacccctctcgctgttcaccccgcatccagtaagtatccatgtcgctgaacaaaatatcccaaagacattgactggaagacattcagctactcggcagctctgcccttcttcttcaagtccaagcagctctgattttgcaaccaaccgccaccccgcaacaaaagcgtacgggtactcgcatccactactcctttcaactgctcagcgtggtgctttttgtatctgcttttgttattatcgaggtgaacaagggctctcatccgcactttgtttctcctcacggtattctgggtctagtcacttacatcgctatcgtgctccaagccgtggtcggtgtcatccagtactttgcgcccgttaccgtactcggtagtgtggacgccgggaagcgcatttataagtaccatcgctggagcggttatgttttgctactgctggagatggcgactatcgtggcggcgacgcagaccacctacaacttgatggcgattcatattcctctttggggtgtcgtggttgctgccatttttatcctcgctggagtcggtgcgaggattaagaagcataaattggggctgtaagatcgggattgagacgggatctgagagtactgcagactatttatgaagcgaatgtatgaagtttccgatgcaaatggagcaccagcctggggcagccgggtatgtagatcgtctatagccgtggaccagattcatgtgagtatccaaatctcgcatgatcatactcgttgcagtgtggcatgaatgagaaccgaacacaaacatttgcaaacgaatcttctcaggtatgctcatctcaagcctgataggcagtgtttaattcagactgccactcggggcttcctttggctcttcgttgatgagggtgatgtctcgttgcatctgtcatacattttcgtgatattcccacatgtatgtagacaagatactgacttcaaattaaacctcattgatgatactctggatattttgtcatacgttgtaaaaaacatgcagatcctcccaaaagggttaaggcgggagatccaccactacacattgcccgttctcttctcttcttccttcccaactccaatggcactcacttcatacgtctgcttcaattgcaggcattcatatggattgaaagcatcgctgcgtaatttttcctccgcccgacgcaatcgagacatcttgcgacccgggacagctccgaagccgacgccggacgtcaaacacatccgccaaaatgccgacctctacgcacagaactgcgtagatcgcaactatgcaggtcacgccgggtatccgtcgaagattgagcaattatcggaggaggctaaacagcttgattacgacctgaagacccctcgatcccgtatcaagcaactagaaaagaccatcgccaagctacacattgcgactcggcaagaaacagatgggaaacccaatgagaagggcctgagtccaagcgaggagctggctgcactcaagtcagaagctcagcgcctaaaagacgattcgcagtccatgaccgaacgcaaaacaacctgcaccgaagagatcaaccgactagccctctccctcccaaacctctcctccccattcacacccatcggacacgacccaactctcgtacaatacatcaactttaacccggaagagccccccgcctggaccagcctatcccaaaccgagctccaagcccggtcgcacgtcacaatcggcacagagctcaacctcctcgacttcgccagctcagccacaacaacagggtggggctggtacttcctgataaacgaaggcgcaatgctggaacaagcactcgtccagtacgccttgagcacagcccgacgccgaggctggaaaaccgtcgcaccgccctcgatcgtctactcctacatcgccgaagcatgcgggttccagccacgcgaccagcacaacgagcagcagatctggtccatcgaacagaacgaacgcgacagaaacaccaagccccaacgctcgctcaccggcacggccgagatccccctagctgccatgtacgccggccgcgacttcaacccctccgagctaccgatcagactcgtcggcgcgagccgctgctaccgcgcggaggcgggctcccggggtgtcgacacgaagggcctgtaccgcgtgcacgagttcaccaaggtcgagctgttcggctgggcggatagcgtggacggagccgtcccgagctcggagggtatgttcaacgagctgctggatatgcagaaggagatcctgacggcgctgcatctgccctgtcgcgtgctggagatgccaactggggatttgggggccagcgcgacgcgcaagcaggatatcgaggcgctcttcccgtctcgtctgcgcgcggcgtcgggtggtactgctacaccagtggatcctaagattcatcatctggagtcggcttggggtgaggttacctctgcttctatttgcacggattaccagagtcgtcggttggcgactcgggtgcgtggcagtggcgctaaggagtcaaggttcccgcacaccgttaatgggactgctatggctgttccgcgtgtgttggctgcgatcttggagaatgggtgggatgctgagcggggtgttgttgttattcctgaggttctgcggccttggatggatgggatggagagtattggtcggagctaagctgaggaattgatctcgctctcgtagagacactgtatattatgtattttttatgaaaatggtggacatatatttatttcattccgctctctttaatataaggatacgtggttatcttcatggatcttgcattgtattaactgtgatcttttggtatatctaaaaacatagtagacacaaaaatgaggtcttcaaagacctccaacgcctgccttgttggggatagagcacaggattaataaaaacagaacagaccaaagcagggtagagcaactcatgacttcgtgaacacatatcagaaacaaggaaacaacataaatcaagtaaacatcacatcattgcgaaatcacagagacagggcacagagacaggggtacaatctggtctctttcgtcagacaataccagcagcctgagaagtcaaggtgcagataaaataaacaaaaagaaataaaacgccctcaaaaactccaagtagagcagaatatccaaagagatgataattagcgcaatttgtaaggcaaataaacagatcccaagaagttgccaggctcatttccatggtagatctatatcttcgacacgggtgcatgtcagatacggcaatcctgtcggagtattctcacgaggaccagcggtgccagtggttggttgatctgggcttttcagctccaattcgagaaaatttcgcatcagcggcttgacgatatcgcgtgccagccgtttcatctcgtccatcttgcgctcgaagcgcttgagagtctcgcgcgtgtaaagcgagccagaggatgatgtaggatggagcttgagaaagcgctttagctcttcatggggcaggtatgcctgcgtggaagaggagccgatcaatctatagatgcgcgcggacgggtctggggaggttgttggtcgagacgggcttgtcgggtgtgacgctgatgcggtaggttgaacgggaccatcgcttgggcccgtgtttttaaggatgggagctggcggtggcgtagtgctttctatcagccattggcggaataaacacacggcgagccagtccaggtatgcgtttgagggaccgacacgttcaccacgcgaggtggttagggataggcgtaggagcttggattcaacgcgagctttaagctcgtcgagatcttctactttgtcttcgatcaggtctaggagtgagtctggtagaggcgcgtaggagccgtttcgcaaactcggtagggcagcgggccactggccgacaacgtggatcaaggcttcggaaaaaatcacccggctgcgggcgagatatcccagcttcaggtagctgggtggatatttggcgatctgtttgaacagacgagatccaaaaccgagtaagtggtggtccacgcgggaccctgtcaccggaagcgcgtcatacatatccgccaatgcaaggagggatttgcactccgtatatgccgaggcgatattgacactgttgataatgggcgggtgattgtagaatattcgtagtaaattgtcatagtcacgtattaagggatcgaccgcaacggcgtgctctccattctgcggcaggtgcgctaccgactgcatccctgccaggttcgccatggatcgaaagaagcctgcctgggcgtttgacggcttggtcatagttgggggaaatgcagtttggtcgccactgaacatggggtcataggttggttgctgtttcagcacgcggcattagcattgttcgcagatgggagtatgcgacgcgccggcgcaaggtgtaccttttggacaaggattgcctcttcatcctctgcgcgattctcccagtcaagttcataccgccagcgtctctttcctcctggtcgcgtcgagagtccaccgttatcagatggtgccagtgttgacccgttcgagaaatcatcatcctcactcagtcgcgacagcgtcccctccggcttggatggacacagagccatttgccgcgaccagttttcattagtgctcgcctcgaagaaacccgaacattgtgataatattaatttgtggaggagatagcgcctttcctgcgatccggcgcggatcacgacctcggtgtcacctgtgtacgtgaagatggggaaatcgttcgaggatggatgcgaggagctgccatggtgcgagcgaccggaacggtgtcgtctgtttgagggacgcgatattagggaagccgtactttgggcggttgtgcgatcaacgatctgtgcttgggacaccatttctggggatttgttgacatatgcgaaccgggggtgctcaacacctatcagcataagagagcgtcatccgaggccgaggatgaaaattggagactgtcgattattgtataacagggaataaataaagagagaagaataaaggaaagagatagttagaggtagaggttaaggaagagaacggagtagttccaaaggctttccccgccgccaaaagaagtaaaaagagtatagaaggactaacaaagtcatacactgttatttaaggagtgagatagataaaatagatcctgcaaaggtccccgtttctatcacaatccagttacaactaaataaacacgaaactaaaatattaatagcagatctatggatgtgcgctgccgcaagcagctgaattcgataggcagagggccaattaccaatgcgacaagttatagcagaagacgatgaaaacataaatagtttctcgttatagcttcatatttatgttactttgatatgaatactacatcagacatgctattataaaatactactacctactaagtaacatcggggcttttcatttcttctttgcctcctccactttctccccttttagcccgtctccagtctggcctttttttgcctctcttctctttcttttcgttcaaatcccctcagcttcttctccggccttcttcggtgcttttgagttgctttttggttcgaaaaatcaatcaggtggactcgggagtatacggtctgacaccctatacgaacgctacttttattgcgacgctctgttccacttcctcgacgcccaacccccgcgatcccctccaaaaatctggccctggacacgtcttctcgggacagcttctatagctgtcccgatctgtcatcactgcagataacgtcagtgtctgcagattttggcagcgacgtgagaaccgacccgtctccttcgcgctgtccttccttcgagtctgccccacacaagaaacgctccaaagccaaagcagtctcgaggacagcgcgcggtgtcatcggtaaagtccgggcattccagcgtatcgctgccgctaaaatggcgcatccgactattaagatcgacaccagcgtccaggcgaccaagcgcgggctacccgagaatgacgacgcgggcctcgatatactcggtgcgaatcaggacaaccccaagctggaagctggaaataccgaggatgttccaccgtttctatgtcaatctgtctcgggtgagtgaggggtgcatcaacgtctatcggagaatactgcacgtggaatgtgactgaccgcttccttatgcagagatccatgacaagtttgaagatctggaatggatacagacctcacgtttcaccgagggtacactgtccaatgatgtcttgcatccttgggctatagaggcagacccgaaggtgaaagagaggaaccggtatattaatgtccaggcctgggcaaattgtcggatccatctgcgggtggccgagggcgagtgtgattttatcaacgcgtctccgatcatcctggaagacacggtgacacgagaaagaaggaaatacatagcgacccaggtaggttgcgtgtttgtcgtaaatattttatggttcacttaccattaatcagggccccaaacttggacatctcgcggccttctggcacatggtcttccatgaaagccaggatgtcggcgttattgtgatgcttactcaaacttttgaggccggccgggaaaagtgcgctcaatacttcccattggatacggagcaggcttcgatggtactattggcggatgagtcggacgttctcttcgatgagagtgagcagacagaacccggtatcttgggtaaggttaccttgttagaatcaaccttcgacgctaaatcacgatctgaaatccgtaaactcgaattggccatcggttcggagtcaaagattgtctggcatttccttttcgctggctgggccgattactccaaacccgaaggcagtgatcgccaagcccttcttaacttgatcaagttgtcagcctcaaaatcgggcccggataacccgcgaatcgtgcattgcagcgcaggagttggtcggactggaacttttatcgcgcttgaccatttgctgtgcgagttagaggcagggcatctgttggatatggaacatccagatgccgaccctgttttcgacactgtcgatcagatgcggcagcagcggatgatgatggtctacaacgagatgcagatgcagtttatctacgaagtcctccgagaacaaacagatcggaagctgggcaagattacagactggaacacagaatcacccgacggcagcgaagaacggtctgcgaaaatggccaagctcaatgaccagacagattacctgccaacctccaagccggagttggaagctgtccatactcatacgccgaccagaagtcggtccgccacaccggagctttctgatcccgataattaatgacgcccgctcaatctccaccgttcttcctaactgtgagcatggactatggacgagaggtttatgtttatgttgcattcattcatggcatccggtgtttacttggttctgaattatgccttgttccaaaccccctgctatgtattttttttctttttgttgaaatacccccgttttgttactttgatcattatcttggatgtagttatactgcttattgagtagcactgtcagtctcgccctagggtcactgtatattagccaattggtgaaagtgtatgctttgccgactgctctgagacattctactttcgccgagtaaacatttccatcataggtttttcgggatcagattcgttattggcattgttaaggctatgtagcacctcgcacgaattcctagtaaatccacaactatacaatcctttggaaataattagaaattctttgcacccttcgcatatcaccgaccatgtgcttgcccatagaagatcatccatcccatcacggcataatataacaataaatagaacaataaaacaaaatcgcagcactgctgagcacaaatatcgagattggtatcataccgacgtgagaagaagacatgaaatccatcatcataagaacagggagtatagcgaaacaagatcagaatacagcgcatatatactcctttccgaagcacaaagtacacgcctcgctccggtagaagtatcttcaatcaatgcgttttgccgcagcagggattgcgaccgactgaccaccgacagagccagcctcatgataactgggaggagcagccactcgctcggaacccggcgcttcttccgtatcccaattctcaactgcattctcgtcccaattatcgacttcctgctcaaggctcataacaccggattcctgtgggcccatcacttctgagtcgcgacgggggtccccggagacgccaccgagctcgacgtcctcggtgccctcctcggtgagcccataccggctttgtcggcggcgttccatcatgcgccggtggtaccaattgcaaattccgatggcgccgacactaccgacaacattggcgacaatatcgaatatatcaaagtctcgaccatttggaaggaaaccctgcacaacttcagagccaacacccagccctaatgtgcagaccacgagggtcacgtgtagcgtgcgccgacgggtagtgtccaggacccagtaaaacgttacggaaagtaggaaaaaggtgacaaggtggaggaacttgtcattgggttgaagctttgttggtatcgtcgaagatgtgctgtgtggaagaagaccgatgtagccggctaagaaaagcaggaagatgaaggcacctgaagcggttagttaggtgatcgccggaaccagaatggtaagtcagtaaagcttacctgcgaaagggtatcgaatgcgcatggtggtcgagtaataagtaagtgacggagaagtgagaagcagatttggctgggtctctttttctggtgaaggtgattgtccagtcttagttgagaaagccgtcaaatgtggaggagtttggccgcagctgatgccttgtgcgtcatatgcggagcactggggacgttcaacaacaaagcagaggcgaaagcttatacagaaacacagaatccacggtaaactcaacacaagaccaatgaggaatgatagattgaaacagctcaagatgtgaacaatagcgattgatcgcgagtcggaatagtaacaatgagacaagatctgccggttgactccgccttcatgtcctgtacttcatccccgtccagagaaacttccctatgaagctcccccggaccttgttcatcaaacctctccgccacgctatcattttttgccattttgacatcttgggtcgattgtaccggcggcgttttctatctctatgccttttgtcccttctccgacccctgtgtcgcgtccgatcggcccgtaatcctaatcgcggagaatcgagtctcgcccgccccagaaacggggttttggagcgagcatgtcgctcggccacaacgcctggcctccgggcaacattcggcccccagatgatctccaggagtctccccgcccagtcaatggcttggtaaagactttatctggctcccggacaccccaaatacgcggctctgttggcgccgaagcgccgaaccccagttcgatatccgaagccgatatcgcgcccgaggaggatccgcgcattgctcaattccgagaattgtatcgccgcagtgaggcgaaaataaatgcgctgttttctggacgatattcgggcgataaccctgcggctggggaagctactgagtcgtccgaagcccaacccgaacgcgtcgataatgcgcctcccccttccaccgccccacggaagtctgcccgaaaactcgacgacgatgattacgatgactatgacgatgatgatgacgaagatgaggaaatggacaatgctgttgaatcacctctggaaaccaagtccgccgctgcatctcaggagcctagtggtgccgcgccattagcacgtcgtcccagtacctcgatatccgccattgcggatgggcttaaagaacccaagaaagagacaatggaggatctccggaaacaactcgaggaagacaaaaaagcaacggaggaggctgccagaaggagtttccacactctattctacacccttgagaatgatagggatgccatgcttgatcaacaacgattggaagagtcagaaagacaagtcgaggcagagatatccggccaggctaacatgggtgccaacaatgtctcgggggcttccaatggctacagttccttgagtaacaccaacctcggcgcttccagtttgactctgaagaaccttatcgcacgaattgacaagaagcgagaccgggtgcaggcatccgatgctgagttgcggagcttgctgagtgaagttcgcaagaatcgcagcaaatgggcaaacgaagacaaggtcggccaggaagagctctatgaagctgcggaaaaggttcttagtgagctcaaagctatgacagaacattcaactgcttttttgactcgtgttaacaaacgcgatgcgccggactatcatacgagtaagcggccctttcaccgcaatgatttatttcatctactaactttttactagtcatcaagcacccgatggatcttggatcaatgaccaaaaagctgaaaggcttgcagtataggtccaaacaagacttcgctgatgacctcaccctcatttgggcgaattgcctgaaatacaacaccaacaccgaacatcctctacggaagcacgccctttacatgcggaaggagaccgagaagcttgtccctctcattccagatattgtcatccgagatcgtgccgaagttgaggccgaagaacgtcgactccagctggccgacaacgacggcgctgaggagagtgacgatgaacccatcatgtcttcgcgaggtagaaaggcacccggcaagaagtcttccaagaaaggaacagccccttctcgtaatactcccagtccttccagggctccaagcactcagccaactgcgccagctcgcgcagattcggacgctaccggtgaagctagtcaaaatggatttttcacaccacctcctgcatctaacacttcgtctgaccccgctggtctaggggcgatagctacaacgagccaggatgattcgatggacatcgacggtccaagtatgtcgacaactgcgctcagtgccatgtcagtttccggtggcgttgaaccggaagaccccgagtacaaagtgtggaagcaagtcaccaagagagacagagcgcgcgttgcggcggaacgacatcgtctcctccggggggacaagcttaactccgaagaacccgctttactcagaagtaaagctggcatgcgccggtggcttcgacatcagaaacaagctactatcgaaacagacaagtctcgcgatggggattctcaagccatggaactcgaggccgcaggcgagagcctcgcagaaggtattgaggtggaagaggatcagatgctgccttattattatgatgtcatgtctggtgttcctgatcttcctgaccggctactctggaaggaggacgcgcaaggcaatgttgttgatgcctctgaagagttccttcggatgcttccaacaggtcaattcatccaacccgatagcaagttgacccgcaagatgaactcgaatatgcggcagatgcaagaaactcgcaagatctgctcgaagattggcatcgtcaagcagatgcagcttcaatctcaggtaagcgagccccatactctactatgaccccagctctctgctaacttcttttctagatgtaccaaaatcaattccaaaaatatcagcctgagccatttctcgagcaagatatcgaaccacatgtcatgaatgacaacggccctgtcattgccccctgggtctgtagggcagcattgcagcgctcggtcgctaaagttttctatcacactggctttgaggaataccagccatctgctcttgaggcggttaccgatattgccgctgactttttccataagctggggtccaccttcaagtcttatatggaaacaccaaaggttcctaccaccgagtcacatgaagctacgccttcagccgctgaatggaaacctgcttacactcgttccgaaattgttctgcacaccttgtctaccgtggggattcatatagatgaactagagtcatatatcaaggacgatgtagatcgtctaggaagcaagctcgccactgctcatgatcgactcaggtcactcctgacagaactccttcgacccgctcttgagggcggcgaagatggctcaaacgcatttgccgatggcagtgaacagttcgtcggtggtgacttcgctgaagatattgatgaagatttcttcggtttcaaggaactgggcttggatcgggagtttggcctctccactcttagtgtacccttgcatttgcttcaaaaccggatgttcaatgcggccaatccgcaaaacacgagtgtttcaccgaccgttactcttttcgctcctccacccccatatggacgcatctcaacagacaacttttctcaccaaattggactcctgcatgagttcttcaagggcaagcttgacgcaaacggtgatgaacctcttgtggaggacctagagctcccccccaagcagcgacccatggggatcaaaccccgtctcccagcctctggcaaaatccccatgtctagtcacctgggccttacatccagtccgcataaacgagccgctcaagcgatggcatccaaatctggcggcgcagagccaagtaagaagaaggccaagaagaacattggggtggccatcgaaatgcccaacttccaacccgatggtgaaggcgaccaagctactggtgacccggccacaaattccaatatgaagaccgaagaaaccggtctcgttgatggcactggcgaatccatgaccaacggagcgtgatgtataacttccgaggtcaggtaggtctatggttgactacgaaaatggccatatcctttccttcacttcctttccttctcttgagtcgcatgctttactttcgcatacctacctgcatttttattctgatcttcaatatctgcgacccatgtctcacgacacggctagacagggttgtgtgtccccttgccacgatacaattgacgaacagggagcgcgcagtaatatgagccagtattcattatttgaccattgcaggattgtatctttggatcctcaaactttcagcgacacataatccagcccttgtattctaccagtttttcttggttttcctttcccttctctatccttggctgaacggcagagtggacaattcccctttcagtctttgtatcataacatcccttgatgggatttcatttatagacggaatgtctattcagattcattcaatttagacctgttctcctatgacttaaatcttgtaggtgccagctcaagcaaagatcaatgggtagctcgacctgtcaatcatagatgtgacaagaagtgaggacaggagctgttccaagatgatgactccaccgaagctttatggaatgaatattttagacttgttagagatgtccaagaaaggaaagaaagcaagtcaatccaccaagttctattccacaatggaagactactttttctgtatcagaggttactatccaacctctaactacttgaagtgtgttaaataatggcataggagaatgaagtattttgggcaaaggggtttttttttgtattttctgggttaacaacatgataaagtaaagaaatatgaaagtatttcgtcatgaactggagatcaacctcggtatacaatcggccaagttgtttcggaaaacaaccgcccattaaaaccaggtccagatcatgcagtgtacatagacgataaaatagaaaacgaaagtccaccaagataaaagagaaaaaggaaatggaaaacgtaggcccattcggaaatgcatcgaagagcgacatcacagaagcaatgccgacgatattccgttcgagcaataacgtaagaaaaagaagagtaataggaaatcagttcgcagatagagaaagccgagtcatgagatgcctcgggagggatggcggacaagagtgaatctcgttcccaaccatagaaatgtggcaagttgaattagatgtaccacatacccagggccagcctgtttaaggtgccttcaatgggaagcaatctcttggctcggggttccttgggcttcgggtttgtcattttcacctccgggccactctgggggccagaggtaataggaacatcctcgtggtggcgagcacgaaccgaaatcaagtgggcatagtagattgctgggtgtacagacacagaggttgtcgagcggatgtactggtagcaatggtcattgatcataccctcaaggtcattgggcttgagacccatctcatccaacaggacatggtaatggactgggcggggagttccttgcagagcaatgtgtgtgtagagcaggaagtcccagtcatgtgggctagtaacatcccgatcaataagagtgcccggcaaaggagctccgtgggagtctgcggctgcgcgattcttggggtcagggaacgctcgaagatggtggcgcttgttggcaaccacaacacacatcttgcctgcccagactggctgaccacatgcatgtgcaattgcaaagcggattgcagggacctcctctgaaagaattctccggtattcggacgcagaaacaccgtcacggaaatagtagacatactcaggagccttgccgcccccaacagtcgctttccactcagcaaccatggggtgcaggatgtactcgatcactttatcccggataacctcaactcgatctccattagtctcgcatccacccatgtagcgagttgcagtggagtttgccgaaaccgacatggctgccaacgacggggtccacacacccatcattggatgagtgacgtctgcaccaatgatcatggagcctgggcgtagaccttgactctttgacttggggacagcccgagcagtgactccaccaagctttgcattcaccttcatgagaacatttgcgtggtattgaggtctattgctgatgcagtgtgcagattggagcacttgagagggggtgccgtaccggcagtcggaagacttcttgagacgaagatagacccaggagtccttgtcgggaacgatgaagaccatgagctgtggctcactcttgttctgcgctgcgatcgcatcgtacagctttttgacactcatgccaacgtcttcgctcaatcctttgacaaccggtcggccagtcacatcaccacccatgctcttgtacatcttgacaaactggtcgacccagttgagggtttggtcatggctgattgactttcgatgtccggaaaagaagccaacaccccaagcctggagggccttttcattgggtttgtaaaacttcttaccgcggagatcccaacttcccgcatgctgcgggttgtgcttgcggttgcccccgaactgaatctcaggactcggaagcaggcgagcctttgttttgatcatgtggtcactgatcttcataccgtaaagcttcaggatcgggtcctccttgtgctggagaagttccttggactggcgagcattggccaaacgcttcggaggcctggttgcacaccattggatcatctgcgccgcctgcatatcggtaagtttgtagcggtatctctgaaggcctttgatgactaggaattcggctgggtaatgaacgtcttccttcaccatctcgaccaagagcatattgggatattcgaggcggatgttgtaccgtttcatgaagtaatcttgaagatgcatccgagtagacgtcccagtagccttgtcgtgatagctaatgtaaaactcattgggctttgcgtgaatcaggcccttgacaatgaagcttttcatcttgaaaggacaaccctcgtagttgggtgccactcgaagaccttgaattctcttgttcacctgtgcgaagtacctcgattccttcgtaccgccaaattcgtcgcgggttgactgtaggttcctgaccagggtcgacttatcgttccacccgttcacattcatcatgtaccccataagactaatacgagaaaagaagacgcaatgagcgacatcaacattgaggatcagaccttgctataagtaaatgtcagtataccaatcttgggttcgaatcaatggattgagccttactggagttggcttaattgcctggtagattcctcggtaaacggaagcacccatgttggcgagcggctggtaaaactcctgcttcagctcctcgtcgtctccaagcttgtcgaagaagaaggcccgcttgattgcggcgaactgtttggtgggccattcacggagcaaatgatcaaggaagcctatcattatcagcctgatgaatcataaacagaggaagatgcggaataagggagcacttactcagagattcaatcacgagttgatccagatcatggcgattctgcaaccaggagttgatcactgacagattgatcttcctcttttgcatgacggacattctgaaagtaggactcgtcttgtactgattcttagtaagagtcttgacatcccgggtaaattcactcctgaagtcaataatctcattccagtcatcgaagttgcgtagcgacctgcaacacaggttagaaaatatataacagcaattcgatacattgcacttaccagcagattcttccaccatcccagataccatcagggatgtgtgcctttcgagtctcactgttccagcactttctcaggatccgtctgtcggtctcgttctggtctccgtggagaacattgatctaaaaattgatgagcgaagaatggcattagatggagggggaaaaacactcacctcgtactggtagacggccttgtccgggaaagaagtgatcgggtacgcgttcatcataacctcaatctctttgccggaagtgttgtaaccaatccgacgctggatttgagtctcctccggtgcagactagacaaaaaggttagtaaaatccatcaaccacagagctattgggaatgacttacagaagcaggcatgattttgaatcgatgccaaggaatgtcaatgttcttgcagccatcccatacaaccgtcatgtaatcttcatggtgctcaaccttctcaaggtccagtctgtgttgttcaaaaacagccactttcacgccttctcttgcaaggcggacgtagtttgccctttcttccgcggtccagttttccggaaattctggaggggtctggactcgacggatgggagagtcactgctactagaaccagtgctcttgggccgtttgtactcgcccgcatcagggtcatagttggttcgacgcatccaagcagtactttcttcttctttcttgcgccgtgcgtcatcttccaatttggccttgtggtcacgcagctcttggatctggcgcggatccagaggctttgccgcaggggtagaaaggcgcagaggaagacccctagtttgacgggaggatgaagaggagggaggaggctttgaagacgtattcatagcagcagtaggaggagggcggtgcccggaaagagacctctcctcctctttgccctctttcgagggtggcttcatggcctttttcggagccatgatggacgttgctcctattaatcgacctttgttagtcgctgttctagttcacgtctgaaattgcctgcaatggatcatagatgtaaagcgaccaagtaagatggatagatcaaagtgaggtggtactgctcagcgatatcaagtgaagtagaaaccagtcgctttcattgcacttggatacagtgtaggagaggccagagtgtaaaaaggatgatcacttacaaagtcaaggattgcagtgagccaaggatgatgattggaaaagagggaaaagagaatatggaggggagcaagaagaagagaaattgaaatggaggattcgtgggatcactgggagagaactgcgttcaacgttaacaggggctcacaggaagagaaatgcgttaatacgtttaacgttaaagtggcaaatgtaccttggaagtatgcagatgatggcaggaatccaagctactaaagacgaagtaaagaagagtgatggagaaggaagaagaagaaagaaagtagaaatcggcgaaggggtggttttatagaaaggttagggcaagcataaagagcagatgtattccctttaaggtatgaattgatattgtatagcggttgcctttttgaccggaaattatatgtataacctgttcaatggtaggagcaagccatagagatgcctaatatagtataatatcattcgcaatcacaaatgcagtcaaagtccgcgctacgtgacgatcaggtaattgtttatactagtgtttgcctaacaaaataagatattcaagactcagatatctcgcacttctagttaaaaacagaactgcggtcaaagtccgtgctaaatgataatatggtacttgcttatactaaggtttgcctaacaagatgaggtatctagtgcttagatatctcgcacttctagttagagatagaactatagttgaagtccgccatataaccataaggtacttaattatgctagggtttgcttaaaaaagtcatgtacctagtactcagatatctcgcacttttattcagaaataaaggatacagccacccatagatcagaccctcctgtctgaatctttagtaccgccttcctaattagttgcgaccaagactggtttacatagtaaaatgagatgcattttgatcagaaaaaaacgtatattctacctcacccctatgggatttaacccttgccgatgaagaagctgattataaagcaagatatgacaggatttaattaggggtttgcatacaaattttaggtatctgctgtcttgctcctatcaagaggagtttgatataaaagcggtgtaaaagttggaaggcggtataggccaagtattggtaggtgcctagcccaattaggaaggcgatacttgaatttcagacagtaggtcaatacccaaaagatatctcgttcttaaaagttgaaaagggatatttcaatcagaaagaaagaataaagaaagaattacaactgttgtcaaagcccgcgctacgtaacgataaggtacttgtttgtactagggttggtctaccaatattaagtaccctagtatttcgatacctcgcacttctggctgatatgtcaaaaaagacatcacgcacttacagtcaaaagacatagaaattgatcaaaagaaaaaaccataaatgctgtcaaagcccgcgctacgtgacgataaggtacttgcttatactagggtttggcaagcaatatcaagtaccctaatacttagacgactcacatctttgattactatcccaaaaccgctattcaaggctcaagatcagaaaacttgccccatttccgccgcatccttaggctgcactggtctaatacaattattcgtcaataaatctcttcataactacatggtcgcaatacaaagggcattcaatctgaatttctttagaatatcacatagacgaagtatacgagttctccatggacctggcgactcatcataacatctcttccgatgctactaggattcatcacaatcatggccatggaggaaccataataaggctacaaggccacaaccgtccttgctagggctctaggcctactttaaggagatggtgcattctacctagacacaaggatacatacagttgtgggcgtggtagtctacatatcgcttgatagccggtctcttggtggcattcctttgctaggagccattcattctccgcatggtattggataaggcacacttccttgttctggctgtcggacaggtcgaacaggatctccccacagtcgacaaattgttccgagatagggctagacagctgacagctagtcagaatgcaaacggactgaaggtacaaccctccaatcgggtccctctagctgtcaacttctgtctagtagaagtgtatagtgtaaatttcttgaagtagcccacgctttattccgacttgatctctatatcactatatggtctatttgaacaacaaatgatcaggtaccttttgtatgtgtatcccatagaaaaggtacatgtgcattagactagtttttgcgttcgacccgtgaaacccaaaactccacttcggcgtttggaagcgttggaccgagaactccgtaccattgtcctgataaattggggattagtggcttttttgtacaggcaccaagcacttcaatgtgtagaagatatttacaatgttcgttattttatagcgacctgacatatccaagtgggtttctagatcttaagataagacaagaacagccgatatgcaatctttgtagaaacaccgaatacagcaaactgagtataacttacgatggtggagaatgcagtgacagctgaccaatggcacaatgaaaacttttctacacgcacaactgctctgtcgtaggcaaacacctccatcctttttatcctcaaaccccggtgataactgtagtacactatgccgccaaagaaagcagtagaagcgccgacgaacaatgtcgtcgccttcgggcgcgtcaagtccaacctcaagatgggctgtgtcggcctaccgaacgtgggcaagagttcgctgttcaacctcatgacggagcagaacgctgcggcagaaaattacccattctgcaccatcgagccaaatgaagcccgttgcatcgttcccgatccaagatatgtatgtttttgccttttctcgatttctgtgtgcgtttttccacgtgatggatcttacccttcccgggagaggctctttccatttttggtcacttcaagtacgatgaacccctggctaatggaagataggacttcttgtgcaagatctggaacccgcccagcaagtacccggcctatttgcaggttacggacattgcggggttgatcaagggagccagtgagggagccgggttgggaaatgcattcttgagtcatattcaggctgtggatggcatgtaccacattgtccggtgcgttcgtggcgggaacttgagaaatgaagcagctacttactattacacagcgcattcgataacgatgaggttcttcatgtggatgactctgttgatcctgtccgcgacttaggtaagcatttatccctgtccaggtgatgcaggagaaatagacgctgatggtgctgcgcacagatactattcagagcgagctgtgtaagaaggatttggatattctcgccaaagctaagattgccgaagaggcaattgtgcggaaggctggaggaaaattcaagatgctgccgctgttcgacgagaccactgctaaaatcaaggaggtaagtcacgatttctcttcgaagagatgtgtagtttgctaactccttgtagctcttggaacaggataagcctgttagagatggagagtggacgactccggaaatcgagttgatcaacgagaaggtttgtccaattctaatactcccgagatcagtgacaatgctgacaatatcaagttacgtcttatcactaccaagccggtaatctacctcatcaacctgacaatgaaggactacatccgccagaagtgcaagtacctgcccaagatcgcggagtgggtcaaggcccacggcggccaaggcagtgatatcatccccttctccgtcgagtttgaggagaagctgtggtccctaaaggatgacaagccagcgctagacgccttcatggccgatattaaggttcagagccgcttgggcaagatcactaccgagggtatgtccccagtatttgcctcacatattcaatactaacagtcatggcaggcttcactaagctcggactgcaatactactttaccgccggcgagaaagagatccgctgctggccgatcaagcagggaacactcgctccacaagcagctggtgttatccacggcgactttgagcgcggtttcatcaaggccgaagtcgtggcgtaccaagacttccatgacctctgcaacggcgagaagtcgatgggaccaatcaaggctgctggaaagtacagacaggagggcaagacttacgtcgtcaaagatggcgatattgtacatttccagttcaatgttgcaccgccgaagaagaagtagagactgttcggaaatgtcatttgcctattattatcgctggaaatatggtctttactgttcctattgagctgttttatcgggcaaggtcttgatcctactacttggctttaaattgcatttagatagataccatggattcgaaagttaaaatggcttcaattttccagcatgttagaccctataggattagcaagtacgccgaattcggctttattggagaaattatatattctgtatacggcggatctgtgaattactgtatgtggttagttttgcctcattggtgccgtcacgtaactgcaaatgttagtacccactgtacaaaacccaatgcgaagatccattagtctatattagggctagaaatggatcatcgagatccctgtatcagtatcaatacagtgacttactataattaaaatacgttgccctgtcttgtggctgaactggcgatatactgctcccggatacctacaaagaagcagagagccgaggattatgtcaaattcatggttatatggaagaccgatgtgtgggatgtctgcccagggactttctgttttccccaccatcacatcacctcactggatgcccgacatatcatcagccttcatcttctcacattctttctcccactccccatacgtccgaaacaagtactcctgcttgtccggatggttacggtagtatgtttcatgattgatctcacagacaccgtcctccttcccctcgtggtcgatgcagaaggcccgattacatagaagacatagctgggttgggaggttgtctttcaggtgtggttttctcaatcgcatcctgtcatggacgtggcaggatccagcactataggtttggttctgaggagtttgtcagcctactgaattaaaatagaggttggtgcgaggtggagaaacggaccattctgtaatgttcgatggaggttgtgttgataggttttaaaggcaggatctcgaaggagcgagcaatggaagatagaaataagggtctcaaattgggtactgttgcattgcatgacctcgtaataactagacgtgggctgcagatcttggcattgtactaattcctaaggaaatcattcttcctgatggaaagaaaatgtctcatttgttactgtcaggcggtttcctgaaacgaacgaagtgcgagaaagggttctagcatggctggagtaatgcctcgtggtccgcaacctgaaattaggcggtgctttgacgctgccaatcattcgtttatcggtacgagtctttaagggtaacagagaatacgttatttgtgatcgtaatcgcgaatggatccggggatatttgcaagggagtggattaggagtcgatatgatgctggatgaccaggaccaagaatttcccatccttgagctctaacaaaatccatcttgagttgaacgagaatagcaaccggatttcaatttgacagtgttatatactatagcattacgatagctttccaatgaagacatgttcattttatcgacacgacagccaagactaaaggcagtggcttaccaatgatactctatatcacgagacagcgaaggcccggtgatgggtgagggcgagattctatcaagcgtaggttaatatttgccatctcagagccgacggaggaggcaggtgtttcagtgcattgacgattgctgattttcaaagactcttctcttgatgaaatatcgctgcaattcaatagtacagaaaagctgcgtccatcgaaatggcttggggtgtcaagtccccagaaattttccataaatagcccgggtggtctagtggtatgattcgcgcttagggttcacccaaagcattaatgcgcgaggtccccggttcaatcccgggctcgggcccattcttttttttcctcttctttcttactagttcattgcaacttttgttattatcaccagcagtcttgaatagccaaccctagcaacaagacaaattatcatgccaattaccgaggaagtgctcgaggccaccgttctcggtcacgcgatcaacaacgtgtccgaacagacaccacgcgcggttttcaaatccatctgcgcgaaaaaatgacgaagcccgcgtagaagccgagagtcgactggtggcgatagtctccgatactgaagagagccctggcaacaataagagaccggtaccacgctacgcgtcttgtgtcaattgtaagaaggaattcgatgtcacaactaatacggaggaaaactgtccaagtgcgactgcccagaatggagattgaatttccagtatgctcaaagaaattaggctggcactttgtgtattcggcttgttttcagctgcatatatcactccttttgtgttggatatcagacatgtatcattccactgaactgaacatgacttgctttgagacaaaagtctcatgatgaacagtttccaattgtaatgtctagtcaatgcaccttccttgcaagtgttcaatgtaaacaatgtaaacattacggattgggaaggtgccatgtgacattgacattgacattgacagggaaggagcgagggacctgtcgcacttgaggaaggcacgtgggttggggtataaaaggccccccccccccaactcttttctcttcttcttctcttcttcctctccccatctctttgaccaccatctctccgtagcctccacgagacagcgtcgacagagggtcccgtagcacctgctgcccaacctaccacagggacatcaacattaccatgttgtggaagtccatgtaggtcagcatcaaatatcaaactgggctttctcgtggatgttcctgaagttgtggctctcatggccacttgatgagtcccacggaatacatgaggggtggggacggcggtagccgaagactcgtaacttcatattgtgtggacattgcaccaacgacataggaaaaaccagacgatcttgtcatgtaccaactagaattagtggtcaatcttcagaaacctacttttgaagagtcctccccaacggccacccgtacagccgcagtgatgcatacgtcagtgtgactaccgcacgggttgctgcatacatataaacgatacctggaggactgccagctaattgctcctctccctcttttttcttactttccccagtcagcaattgcactctcttctctcagcctctcgatactgccccccccccttttcacacccaccatgtgcgacgaaatgtatactcgtcaatatcttgccaagatgatgggcaaagagatcactacacactgcccggactcttcgaatgaaaaataagctactctctatcccactcgcaaatggcttatcatggaaaagctaagtgagcaaccaaccccggttacccaagaggatttcgccattggtatgggcccggcatataccacaggaaaatatctttgtcggcttgccgagaatgaggatacgctcaccttgatgcgtatctacaaacagattcctctaattgacactgaacctgaagactcgacagttcggaaggaacaggcctgcgggccacgcaaacacgtcgagctgggtgccatgaagcgttttacagagaacggctgcactgctacccccagtcttcttgtgtaccaaatcggcaagcaggatgaagtggaccttgtctctggtgggtatatcacataccttgtatgggaaaaagtcccaggagatcctcttgatattgagcagttctggatgtatccgtacaaaaaacgacagaaaattcggaagagtttccagaaggcctatagatttgttatccgagcttgattatcatatacttatagctaactagaattcgcgaagctctaagcttcaagtacgagccaatcttccagaccccgacaaagatcatagtcgacgaatcagataatgtgtatgttctactccatcccttacaatcccaagctcatagcaggtagcaaaatctgcggtttcagccgggctttcccagtccccaatggatggagagacgaccagtacgtgatgttttccctggtcctggcctcccccgatgacgctgagtatcttcccgcctcggcggatgacctcaaatctgggccaaatggctggaagtggtgaggagcagccagacaagtgtccaggccaaatggacggaagggtcttgaaccaattctctagatagtcaaacagtctacaaattgagtgcatggtgcttgcttaatttattcgtgagattatctgcttattcgagtctgtacaaagcatggctgggtgggtccaaccagcaagcagaattggtggcccgtggccctatgtaaaaaaaagaaagagataaatgccaggtagatcaacgccggtggaagatgcaaaggggggctgggctctaaacaaccgcgtatgctccgaccatgtttccatgtttcatgaaatgacccccacgaaaaaaaaaagctgggccatcgagttctcaaagacaaatcgggatattttgcgcgccggggaaatgaaattgcaaaagcagagagcaaggggttttacactgcaagtggaacgatggtggtccccagagagaaacgagttatcacgggctcaacggtaaccacctggggatatatgagtgataatgtcattatgagagagacagataatagacttaccggagtagggattttggcctccaccgtgcgcagcttgcggtatctgtatttgtgaaatgtcggaaggaatatcaacgtggcgaagaaggtctatcattttctcgggagaaaggcgggtaatattgtatgttgccgcagaaggcaggatgcttaagagattcaccacttcacgaggaagaggagctggagacccttggggtctgtacgaggtgctctggccgttcaactgttgtactcgtttcggctggtcgaggcgccgagcttgcgcgctcttcattggtgactcagcgcgaacaaactttcgtggacgacctgagtcttcatcatattcatcagtaggatatggtctcttaggcgaattgagagaggtatccatgtatctggccatgggagaaccgtgatattccgcggagattcctgccatattggtcttttgccttgtctgggatggggacaaaatgagttgcaccgacgtagggtcaaagttggagttagagtagcgattggcgaattgttccaggacaggatcctccgggtatagttcgcgcatgcggttctccaagttgataacttgggtgaggtcaccgtagcgagattcatactcgtggaggaaggaaaagatgggcttagccttgtacacattctccgggttggatgtcaattttctgacggttgtttcgaacacggctctggcatcttttgcagtggttagtaggtcttctataaacacgggatgtcaacttactgatggtatcattaatgtcgagcagatgccttaagtattcgagcgcaaagtgctcatcctccgggaataattttgcacccctctcgaagatcttggtggctgcagggtctttgtagcaatggtactccatcagagcactcgcgatgtaaacatcgcttgtaatccgacctcgtttccgggcttcggcaaaaatttggcgagagccagccagttcccccggttttcccttaccttgaattcgacgcatcgaacgcatgagtgaaatccatgcaaaggagacagtcttggagataatgttgatctgaacggaatgggccttccggaccgcatcaatctgtgccgtcttggcggcttctctttctttagcttcaggatcatcatcatcctcattttgaggttggctttccacattttgtggagcaaaatatgcctcgatgcgtgcgacgtcctgggtttcctggttgcgagccttattgatcaactcgtaaagagcatcaagcaatttgtcgtacggttcccggaccttggcagcacgcttggcggaatcctgttccgaatccgaggtaacctccaatcgatccgcgcgtttgaatgtcagcaaacaactctctgggtttgcatcaatgccattcttcaagaactccgtgcctgcgtcctccatgtcgttcaagaagcagaactcagctgcatcaaaccacatctcgggcaagaaggccagtgccatgagtgcctgtttgtagaagtacactacgcgtgacttgtaagcagcagggtcttcttctttcagtaccagaggatcttctttttcccatgcgagccagcgcttccagatatctgcttgtgctgagaattcaacgtcgccttcagaccccggaaggggaggcagcggtggaagcgaagtgcgaatcaagtcacgagtgatgttttgcaattcggtgtatgagctacgcgcagtcatgtatgacggtgaatgttcttgaaggaatttgcgtccctgatagaaaaggtcaatataagccagttgaactcgagtactgtccagcttaccgtgagcttgtttagattcatctcgaattgatcatactccttccagagagtattgacagcttgggtcggcacgccaatggctcgttggtaggcctttcgcagtaggtccatcttttgttgatcctgccatccagatccaccaacgatgcctggcccagaacggatgaactcaatatagtctgcccatatgtttccggaatccttgtccatcccaacatattgaatggccatatcatatgccgatgaaatggtcttccttgcctcgccagaggcatctgttgtcaaaggattacgacgacgaatgtaatcaaggtagacagaccaaagctgaacgctgggggttgtcaggagcgttcggttaaagatctgctctaagcggaagaattcattgagctcagactccatgctggcataagccacccattggtcggcctgtgatgtatcccattagcaatcttgtatcttgccgagggtgaaaatgaaagaacaaagaaagggagcaaaggtaggcttaccgccatggggaacaacttcaagaaccgctcataggtgtcacgtgcgctgtctagtctgctgcggcttctgtgctcggcaattaactccaaccaagcagggatatcacctcggggatcctctcgaatccggtcttccagcatgccgacacgatcatgggccagacgaccctttgaggctggagagtcaggtacagaagtaggaacagtactgttctgcatggttgcggattgcaggtcttgcgcagcccagtgcgattggccaggaacagaagagggatcaatattatgaacaggatcaggagaataagaactattggcaacatctggtccactggcaggtgcctgctcagcatggtgtgatgatacatcaggggaagtgttttgcattgcatttcctgaactgggatcttcagacatggtcacaggcatagcattgacatcttcacccccaagtacagccggcggctcatactccgcgtcaccctcatcatcctcgtcatcatcaacctcaaatccgccaattattcgggtcttggactgtggctcagcagtagatgctggcacgggggtcgacgactcaacacgtgaggggttctgagaagggtcgggggagtcactagtctggccagcgtctgcgtctacttctgaggcgacatctgcgtctggggcgacggtcgggttgggaatgggatcttcgggctcatctgagggagccgcatcagtggggccggcaccaggctgcttggactcgggaagggagacggagtagtgatcccccaatgccagtgaggggtcgtagtcatctgattctgcgtctgagttatcaccttcctgctccttagtgggggattgggaatcgggattcaaggcttgagcctggaagaaggcagcttcagcttcatcgtccgccatgatgggatagatgattaatgcgataagagcgaggtcgaagcaaagtaagcaaccgcgaaagtcacggcgcaggccgaagcagggtttgcgcggtgtggtatcaggaggaattaaagtaaagaccaatgctccgaaggtcaagggttaaggtggatcacagccactgttgacgagataaccctcagccgcaatgtgaagcaaataatagccaagagtgagagggtgcaaagctgcgatgggctgtgatgcaagttgcccggggattgaaattagggtcacgtgcgggcggtgaggacaatgcgagggacgcgaaaggcgcgtcgatcgatgggctcctcgcattgagctagaggggttgagagcaaactgcattcttgtggacctgttgttttctcttattttctctatcttcttcttctttccacccccctgttcatacaatcttctactcttgcctctactctttaatcccacgtacatacactcatatcttatcacaatgtccgtcgtctcactccttggagtgaaaaacctcaacaacccggctcctttcaccgcctcgtaccaattcgaaattaccttcgagtgccttgagcagctccagaagggtgagcattggcttattctcccatctcctcagaccactcttctaacattctttcagatttggaatggaaactcacctacgtcggatccgccacttcgtacgtccaccctccctccctcctaccaatgccacaaagtctaactatcacagcgccgagtatgaccaagaactcgactccctcctcgttggacccatccctgtcggagtgaacaagttcatctttgaggccgatgcacctgatgtcaagcgcattcctacttccgagatgctcggagtcactgtcatcctgctcacctgcagctacgacggccgagagtttgtccgggttggctactatgtgaacaacgagtacgacagcgaggagctggcagctgagcctcctgcgaaacccgttattgagcgcattcgtcgcaatgtcctcgctgaaaagccccgtgtgacccgcttcgccattaaatggtgagaaccccttgttttgtttatttacatacctagtgcggcttttactaacatttttttttcttagggattccgatgactctgcccctgctgagtacccgcctgaccagcccgaggccgatggtctcgacgatgacagtggagcttacggtgccgaggagcgtgagctcgaggctgcgctcctcaaggagctcgaggactcaaacaagcccgccgaaggcgaagatcatgagatggaaggcgccgaggcccccgctggcaaagaggacgatgaagaagagatctccgatgccgagagtgaagatcttgaggcggagagtgacgacgatgaggatgagctcgatgaggaagagggtggtgatgctgatgaggatgtcgagatgggcgacgacgcagaacacaaggacgatgctgccaagccaactcaccagcctcagcccgagctcatggtacactagatcatggtgtgctaccggctcgcaggagtggtttctttgcttttaaactcttccttttttttgaatgttatttaacgacagccagaacgcaacgtttacgaccctcggactaattttccatgttattatcctgatttgcattggctatcggtctatgaaatagaattggtataatttaatcccactggcattcagtcagccgttcgtattcatttctctaaatatgccgtaataggcacactaccgggccatatttgtatcacataagaccgactcccagatgcctaactagctatattgtacggagtagtagagggtagattaatgtcaaaaagcgttatactcttgagtttgccacccgagacgaataaacacctacaattgtgagatcaaggtggatcagcttgaagcggggagtcaaaaagtggatgaatgagattgcaaagtgatctgtcaaataacataggcacgatgaccccgctagttaacatgacgccggaaaaaaaaagccaaagacgccgacaatggacagttaagccatttcaaaaacccggtactatttagtaagagatctcgcctaaaagccgaacttggaaccaattgctgttgtcaaagaacggtcagcgacagttatgcaagggggttaagcgtcaaaccctatacatgggtctgtggactttgaaggaagattgacttaccgcccaatatagccttcttcttttgtgactgtacgtatttgccaacatcgttaacaaagccgctgctgttttcctctagcctgtccatgctatctccgacaatcccgagacgctctgtgcgttcttggacttgacgtgacatgtaagaccagtagccttcctgtccctgtacaggtgccgttggaatccgtccttcttttagagctctccgacgttcttgttcttcgaatttcatttgttcgaccatctcctttgatggtggccggtctgggccgccaactaaatttcatattagattctatttagagcggcatgtgcgggagtgacgtacttaaaatgtccatatcagccggcgagatatattgtgtaccggagatccattgcacgttcgtgatggtaggacgcgggggaaccacagctgctgggttgtaaagcttgtcgtttgaaggatgtctgtatgagtagggttagcattagcactatgtctcggcagattaatgagggacacatacagtacgtttccgcctccccagacattgaacagtccaacttctgatgggccgacccatgtcatgacgtttccagtaggggtgatgcaagcttctgagagacgtcggatgtccgcaatatggccaatcttggtgcaaccaatatctcgaagagcggggatcgagaatgctcgcgcgttgccgtcaccaaagagaccaaccaagctgtagccccgtccttcagtcttgacaacagctgctgaatcgcaaagacagtcatcccatgccttgtgagcaccctttgatgttgggggcttgaagattcgacagccagaggcagtcaccgcaatgacaacaccattaattttcgcgccagttctcaagcctccaactgcacttggtgtggccaaagcagagccaccagaatcagcatcgatggggatgacactgattaccctgtcttcaacggccgatgatccagcaaaagcagcttcgtaggtgccattggacccagggaggatcttgaatgttgcgactttgcccttgttcgtgccgacaaagcagcatatgcttgagtagtctagcgcatagttagtacattgatctgattcgagcccgaatcatgcataactaccttcgccgtccaaagtcatcacaccaaattcaatcttagtgggccattcaggttggacttcgtccgaggcacggttcttgaggaacccgctccgcttctgtcccttgaggaggtctgacatatgtgcagtgtgtataatggcgggcccgcgtaggtcaataatcaccaaagtaccgcttttgtaaccgaccgctacaaatcccacctgcccatgcttcaacgccgtcactggaccttgttgcatatccaaaagagtcagaggtatcattcccgtcttgagcccaggatctgttcgcttagttatcgaggtcaactgccctggcggttgattgacaccgggggactcctcagtcccgtatgaggggttattgccccatcggaagacggcaagctctccggtcttgagtccaatagacatctcgcctgagccgctggcgagagacatttcaatcacttcgatattgttgactcggcctatggcacgggcaagatcaatttgaacgacgtcgctgttctcaatttcatcaccgtgcccacagtcccagacacggacggttccatctgcgtgtgcggtcgaaatgatattccggctctcaaatcgcttgaaagtgttctttgcttctacgccgcccatcacaaatctgggtccctgcatccggcgctctctcagaccaagccacaccgaccgatcaactggagtaagcacagctttgtttacaaagggatggacgaaggtgaggaacggatgaagcatgttagtgggagtaattgcgtgtccgctggggaaactcaaggaaataatttcacccgaggatagcatagcgataagtgcgattggatcatgggcgccattgaaatagggcgaggatcgggggatgaggcaaaagtcaacaaccttagctcccggtgggattgatagatttatttgtcgccgtggccgctcgaggtaagtagacagtatctgccaggaggacgtctgatagttgggggttgtccccatgtccaggaaaacgagtcccttgctctgatcacctactggtcgaccaccagccaccaaaagaccagtgtcttccgggttatctttggtgcaccaaatagcctttgtgatcggctccttgggtccagcaccctctccaggtgagcccggtctgccagcagcaccggggtggtcgacattgggtacctggacagtccgggcatgaagcctacggccatcctttgtatcccatagcactagacttgaatcatcatgaacggtcaaaatgaagatcccgttgggatgccagatcgcttttgtcaatttaggtctgcgcacgtcgtgggccggtagggagtctccacctggtgccccaggagggatttcgtagacaaagtacttttgagcaatattttgcttgaacgaaaatgtcactgctccctctggatatcccactaggatcttgccaatgtctcgcggggagaactccagagatacgacgggaaagaaccgcgcgcgagggtttctttccaaccacaagttcggaactttgaacggcgtcaaggactcccgatcgagatcgtacgcaataatctcacctatccacaagtcaatctccagtccttttcttcccctaggaatttacataccattctgcatgccgataaaggcataatccaagcacgggtccgttagcaaggcagttacctggcccggtggcgtataggaaaccaccatgcgtccagtcaccaaggagaatatgcagatttcgttcttggagtcgatgctgaccagtttgtcgccgcaaaactgaaggaaccgcgcggacgcttttcgcgggaactcaaagaccaccgaaacccggcgttgcccaaagacatagatctgcccgctaccgaactgggtatcaccggtaccgaccgcgatgagggattgtatgggatcgtatgcgatagtactaatctgcgaattcacaccgcatcgtgcgaactgagaacagcggtgtcagttggggaaaagagaatgctagggatgccaagaacttacatcgtccaggaggaacaagtccggggacaagccctcggacaggtccttctgtataccagcttgctttcctcgcaggaactgagccatctgcgataggggtatagcaagttatggaggagtagaagaggtcaagtgcggagaagaacaccattgacgccatgcaaaagctaaacaacggatctgccccgctccgccctatcgccctatcaattccgacttggcattcaaggcaacgtgattcttttcttggtcttcttgttctatatataggttgggatgaaggtcgtatgtattttatttcaattggaacccctggaaattcgtggataaaaacgctatataacaatgcaaaaagaacaaaactccaaatcacatgcatgtatagggccagccccgtcgctggaaggaacctcgctatgcaacagaaccagtataatcgagatcgttttaggtatcaccctggacatataaagcgccagacaaatcagtttgccccgttatgccagttcaagtctcgtcatttccgcaatcgtggttgtcaatcgtctccgcgcatcaaattcgctcgtctcatctcgggttcgatagtattgcacagtgatttgggacaccagccggtagcacgcatatctaggaaaagaaagagttagcagaattacactaaattgtaatggtattccaaacacatacaaagccagccggatgttttcctccattgtcctggacgccgccatccctgctccctcaaagaccgccggggatgcatccgcgaatacctctgccatcaaaacatcaccccacatggcactgctgaagtccacgataccagacagctgtccggactcttcgtctaccaaaacgtgggagggtcgaccaaagtccacgaccacaagacgtggcagcgatacatcttcaagagcaggcgctaaacgactcagctcctgccggatctccgagtaaggaaggtggatgaacatgtcctcggcgtcacggagaacaccttcaaccagggaacagaaggcctctcgccaggagggtcttccagcgccaaatgccacttgctgcaaagacccaaacccaggggctgcgtgttgaccgatggtactcaccaagaatcccaagtgccggtcgatatcatccagttgctgggaggtgagctcgccttccatctctgatagactcttccctttcatatattgccggaccaagtaggcagacccccagactcttctgtggggatcataatgatagagctgcggtatacaagggtttgcagactgccctagaagagaaaggaactgggcttcggtctcgaggaacgatcgctcacgccgaagcagagcggtccgtgatgatggggatccctttagcaacaaatgagccccatttgacagcatcagaagccgcaatgggtgcatgtgaccgaaaattggatgtgagtgctgcacacggactgtagaaggaaacagcagcgagaggacatcttctagtctattgtgttcgtctacctcggcggcatgagactgccaacgaaaggaatcgctatggccgtgtgttcccttgaatgatggcatcgcagaacatgtcttcaagtcaagttgcatcataacctgtttggtgggggatgttggcgaatagagaggatgctatataagccaggctatgccgacccatgaatcttggaaaagatattcgggggatgatgtacgaaagggctactcatagaccttgagagccaagaggtcagatatatgccgaggggatagtttgaactgaaaagcatcttcccagcagatgtggcgcaaattcgcttctgggatagagaattcgcgaaggaacccatagtacggagtactctatagtgatccttcgaatatcaatggagcacagcagaccgccatgattgtctacttcatacgtgacccgcaataggaacagtgacagcttattttcggcgacgtgcctcttctaggttcatccacgcgagatacgaaagagaagacatcgctatccgaggttggacatagattgcggagtcgaattcgaagaatctgtttcgctgagaaagcattcacaagcgagagtccaaagacctgttgtcacattggttcataattaataggaaatatgggacaagtaaattaagtgaagccgtctcgcctaacgatcccgctctaagaaaggtgatcatccgagcactttaccccttgaccaatcacaacggttccttgccgaaatcttccagtggagttcagaaattatagaacttttcaagggttctaattgttctagttgttcttctcggttactttccgaactgatttcgcttactattcgaaactagtctatttccgttttagccatcgcttctaatggctggaaccgtctgaaacactcgatgcaagccaccggaggttttactctaaaatgaaatgacttgcatctcaaacagtttttggagtcatgatggacacttggatccgcatacatatagcttctgtcttctgtttcattcttttcgacccttttttggactatggggcttgtcggtacccgtcacgacttatcaccgtatgaattcagtcgctagtgttgagccctctggtatagtatcttagctacaggaagtgtgatactactagttgcaaagatcggggttcaacgtcaagtatgtttagtgtacttttagtgtcgatggtcaaatacatatccgcctcttgtttggccgaggctaaatatatcattctaacgaggctaaaaatataacagaagggttttctctagctttcttggctgtttcatctgtcagctataattcaagagcctctatcatggtactcaattcctccaacgtcgactactcgatactggacgcatgcaaacctcgtcaatagtgtatattatttatgcggagatttgcataaatcatgcaccggaaacaaaccccaatatggaaggtgtctatggtttctgtttcaaattcactcgtcttgctacacacgaagtcgcccgaaaagattccgagttactgttcgacgtcacctgcctatgaaggtatatagatgagtcggtttacttcaaaggactagttatgaatgtatgagaacagcggtggagatgatataagtgtagcatcggtggtagtagttattattgaactacctaccgcggtaagtaatgtgtcattgatgctaagccttagactcagtggccggctctgcttttggtgaaggatcgtagatttcggccaagttgaaccgctttagcttatcataatcacctggcactacactcattccaatcacattctgcgacaagtcagttgaagatttagtagagggttcgttttgtagcactcacttgggcaacatcaacgaggatcattagatcataattcttcagattcaccggatgctcaggcccgacagcatcggcaacagtcttgataataacgtctcgattgagcttcgagttgccccgcacagtaggccgaatggcatactaaataggtgacagatcagcaatgctcaaagtacatttcccctcacagcaagatcatttcctagattagtagaatctccgactgcgaggtagggatgccttcaactcaccgtctttggtggcccacccgaatggaaatgaggcttgagaatctctttcgaaaaagccgccaagtccacactcagggtcttccggattgatgtgactggatgcatgcgcttgatccatcggcttttcttagtctccggatgggcatgtgcttcgctacacagacggtgcacaagctgtaccgggtctattgagggatccagacgcatgaatgtaactgacagggattagcacctatgaacgttccgagggccgagcgcataaacgaaatggcgtttctcggacgatcgcagacttaccacacggcatgtccatctgcacgggctggaattgacgagtattgtttttgctgggctgtaggccctccagttcccttcggatctgggcctcgatatcttcatcatccgtatcgtgatcctcttccttttgattttcagtgccctcgatggcctaggcgaagagttagcgaaaaatagaagaatgatcccaagcggaaaaaaaaaaaaaaaagatctcacctgagtaaaaatatctactgcctcagacaggcattttccctctctgcccatatcgcatgtcacaaagacacctacatcgccagattcaatcgcgacgcgactggcctgtttcccatattttccaccaccctaatcccattagtcagtgctccatcacaagatttgttcgaaaccaacctttctcttctttgaagagtgacttgatctatcaggcatagctcttttccccatttagcaatctaagctttgatatgccaggatgttggaatgtggcccaggtggggggtcggagtttgtgtgatcggccgagagctgcgttcggtttagccccgagatcgacctttttcatgatatgcttattcctccgtacatcggatttgcgacctgtgtacactattctatggcatgattatgtaggtctagatacataataaaggcttatttgttctgctacgtggcctagcctacaaattgactctaaaaataacacaatgtctatcaaagtacgaaatgatggcatgacatcaagaccatgacgtagtccatgtggtctcacctttctcacaaaagttcccctccccctctatcccacctcacctgttcctacttctctttccattctaccatatccctccaatcatatcaatcatcatggtgtctaccgatattgctaccagggaactaaataatcccgtggatgttgccgaatacttattccgacgtcttcacgaggtcggaatccgctcattgcatggtctacccggtgattacaatcttgtagcattggattacctgcctaagtgtggtctcaattgggttggaaactgtaacgagcttaatgccggtaagacagacttgacgacgaatgaacaatccccatctaacatcacctcctcttaggttatgccgccgatggttatgctcgtgttaatggcatcagtgctattgtcaccacattcggtgttggagagctgtccgccctcaatgccatcgcaggagcctactccgaattcgtcccagtcatccatatcgttggtcagcccaccactcagtctcaaagggacggaatgttgttgcaccacactcttggaaacggtgacttcaatgtatttaccaagatgagcgagggaatctcgtgctacgtcgcacgcctgaatgaacccaaggacgcagccactctgatcgacagtgctattcgtgaatgctggatccgcagccgtcccgtgtacatcactctgccaactgatatggttgctgctaaggtcgatggcgaccgcctcaagacgccgattgatctttcattgcccacgaatgacccggagaaggaggattacgtggtcgatgttgtcctgaagtatctcgaggccgcaaagaaccctgtcattttggttgacgcctgtgccattcgtcaccgcgcactagatgaagtgcacgatttggtggagaagtctggattgccaacctttgtgactccgatgggcaagggagctgtgaacgagacccacaagaacttcggtggtgtttatgctggcaatgggtctaacgctggagtcagcgaggccgttgaatcctccgatctcattctgagcattggaggaatcaagtccgatttcaacaccaccggtttcacttaccgtgttggacagctaaacagcattgacttccatagtacctttgtgagagtgcggtactcggagtatcctaatatcaacatgaaaggtgtcttgaggaaggtcgttgagcggatgagtactctcacccatgctcctattcccccggcttcgaaccgactacccgaaagcgagaaaaactctaccgatcaaaccatcacccacaagtggctctggcccatcgtcggacagtggctcagggaaaatgacatcatccttacggagactggcactgccaacttcggtatttgggacacccgcttccccgcgaatgtgactgccatcagccaagttctctggggcagcattggctatgccatgggagcttgtcaaggcgctgccctcgctgctaaggagttgggagatcgtcgaaccattctcttcattggcgacggaagtatccaactgactgtacaggaactaagcaccatcctgaagaagaagttgaaccctattgtgtaagcattcccagcagcccggaatgcccatatcatatactaaccatctccagtttcgttatctgcaacgacggctacactattgagcgatacatccatggatgggacgcaggttacaacgacatccagccatgggactttgccaacattcccaaggtcttcggaggagacaaggacaactacgcaggctatcgtatcaagacccgtgacgaactcaacgagctgttcaccaaggaggaattcaacgtttccgacaagcttcgagtgagttatcaatacaaagaagtcccaaactgtttgctaacacggtatatagctggtcgagctgtacatgcctcgtgatgatgcccctgcggccttgaaattgaccgccgaggctgctgcgcagcgcaacaaataagcggttcgaatcacgagaaagtattatgactcttgtcgtaacgttacgatgcatatgaaaagcaacatgatagcaatacctgaactctgaattgtttaggcctcggtgctttctttccattctcacggctttcaaagggggtggccgcatagcggcgggatttaataacggtcgttgagtatgtagcatgcacatcttcgctcttcactcatgaaatacaatgaaatcttcatatcttaagttagaagtctaccattatcaaaatctgggtagatatatcaagacatgatactaagtagatgagaaaatgcaagcaacgccgacccagcgtccgaggctagtacgaggctagtacgaggctagcgtcgctacaatgtcaaaataagcatctcgcgttcaaagttaaagttaccaagccaaatgctttgaagttttctctggcagattctgctcaatttaaaccaatgtcaacctataattcatttctaaagctgcatacactcctgcttatgggaggtaggaggtggcatctttcttttaatgtggaatgtcccggtgggaccacttgtcttcgattaggtgagagatgtctaggaagttctcagggataaatttacgatatcagatgcgagtccttttgtcattcgttgagctccgatgatatttgcctccgctaggatttgggataccggtgagagaaaggaaaagaactgcccaatatcaatttcctagaagagcctcaccctaggaaactctaccaatctgatttaactaaagtaaggttcaccatccacgtggaacaataaaaagcggaaataggctaagcccgaagggaaactcctgtccgaaccactaccggaaacagcaataagtcatatgagtccatatgagtccgaagtacggagtagcgaagaagagacatgtcgaatgagcactgaccgtgcccaggtggacacttttacgctaaggcaaagctgtgaatcatctcgactgctaaagctaagctacagtgtgactatgttgtgtatagatccgaatttgccgagtccagactgacagcaaaaaacgaaaaaaaaaatctcttctcttccaagacctgaaaataaacaaaattcccgatggtcgccgagaaacttggaaggaacaaaggaaccttggaacgaacctaggaaccttccaaagttggaaaggcccgagagcggtccaaacacgcgggatttgatttttaggattgatctgataatcttcatctgataagatggaaggcgaaagtgtgcctggtaaccttatatccaggaacgatcttcctgttcatcgctcctcgttgatatatactcgatctgcaagtctacaaatttttcatgaaaaggtcatctctgtgtcccatgacagcctgctgatctcgggtggagctccgaaagcatctgattacctgcctctctccacttggcgcaaaataagcccttagcggccaaaatgcttgcattctaattgggagtctgacgggctggattaatctatcatgctttcggggtctatgaggggacctgacttttatttgaatatggcaggttcccctatgcttattgatacccttggatattccaagccatatctatatgtactctacttctaatgttgtagatagaattttacatttgagtacatatgctaggtatgcataagacaaaaagcctgggacgataatagaatgcaaaaaaaaggaaggggaaaaaaaaaacaatcggcctgccgcgactgccggcaaactagagagttagccaaactaaccgaaactggagacactcggatttggccgatgagtctgtaaaccaatcattgcacagtattttatcggcatcattcagccgtgagaagcattggtgaatcccacacacttccaggttgagtggcgtgtcggctggtccgttgttagagtcttaattccatggcttggggtatctgatccgtttatctccgggactttggtggactaaccggtcctggctattccgtgcaccttgtaaggttcatggttagcttccaaaaggattcaactcactaaaaaactctttagatgctccatcccccatatatagctggactccccgagtgtacctcttctttccttttctttctcatattctcaatctttttttcggagctccctatactgtagtcatgggtgtcttcgatctgattcgtggtcggaaggaccaggtggtcgtcgaggatctgcgcccaactcaaggaaatgagaagcccgatatcaatgtggagcaaaacacggtggacgatcatctgaacaacctgggccgtgcagagaaggagatcgaggaacatcctgaccaggtcaccgcgaatactgcagatggtgtgcgcaaggctgaggctgttgctttggtctggagcaagccggctgtttacgcgacatatgcctggtaagtactatggatgagaacggcatatgaactagaatctcacatctacaggatctggatctgtttctttatgttggctttgcattcctctatcggttccaacgttctctactatgcctactccaacttccaggatgcttctcaggtcagcacggccaccattctggcaagtatcgtcggtggagttctcaagcttcccatcggaaagatcttgactctatggggacgtgcagaaggtctcatcatcttcacaaccgtgtatattctcggcattatcatccttgctgcttgtaacaacgccaacagttacgctgccggttacgttctgtactgggttggatatgatgcgatctacataatcctggacatctttattgccgatacttcgggcatgcgcaaccgtgctttcgcctttgcatttgcctccacaccattcatttgcacttcattcacgggtccactggctgctgcgaatttcctgaagacttcaaactggcgatgggcctatggtgcctttgctattatcatgccctttgtcttcctgcctctggccggtgtcttcaagtattatgaaatcaaggcccggaagatgggtgttttgcagcgcccagttagcggcaggactactatgcaatctatcattcactacttgcacgagttcgacagtgcgtatatatcttcccttctgtcctccacctatcactgaccaaatttttagttgtcggtgccttccttctaatggcggctttcatcttgttcctccttcccttcagcttggccaactatggccgtgcccagtacgccgaagccagctttatcgcgcccctggttattggcttctgcctcttctttgtctttgcggcctgggaaaaatggatcgcccgcacccacttcatcccctaccagctcttcaaagaccgcaccgtcctcggcgcctgctgtctctccgctatcctctatttcagcttctactcctgggatctatactactactactttgtgatggtcgtatacaacctcgatgtcacgatgaccggatacatgacagcgatttacaccgtgggatcctgcttctggtccccgatcttcggcatctggatccgctacgttaaggagttcaagtacagctgcctcttctttgctctaccattgatgatcctcggcgccggcttgatgatccacttccgcggctcggacggcgatattgggtacgtgatcatgtgccagatcttcattgccttctctggaggtatgttggtcatcggcgagcagatggccgtcatgtgcgcgtctgaccgtgagggcatccccatgatgatctcgctggtttccttgttctcgaacttgggcggtgccattggctatgccgtctccgctgccatctacgccaataccttcccccagggactgcgcgatgccttgcctgagagtgccaaggatcagtgggctaccatctattccggtggctatgttactcaaatgcagtatctacccggcactccggagcgtgacgcgatcaacttcgcctacggatacagtcagaagtatggctgcatttctgcgacggcgattcttgcgcttgctatcccctgtattggtatgtggagacattacagggtggacaaggagcagaacaagggcactgttctctagatctggagatgaatgaggacacatgatgtgtccaaatggtggatgtttatgacttttcaaaaataattcttacatgtatcctgttaacttactagcgagatacaatgtaattttcctcgtttagactgtttttccactgatagttcgctaatacttctagtagaagtcctccgaaggcgactactttcatgccagtattccggaccatggtggctaaggcatatgctaagttttggatttatttccacccaatgcttttagagcagaccgaaaatgaagatgcagacgccacagcactgtcattggcgcgtagcagataccaggtgatcacgggccaccgaaggtgagattgggagattgcagggccagacggggtctgggggatatcccatgaagaaagtgctaaaagtacgatactagttatactgttccttctttctcaccgtgtactgtgtcctatgtacatatgtgctactactataaccctaaaaggacaggaagagggagtttaccatatccaaggaccacgtgacgatccccctcgagacatcacaatcaatataatcaaaggccatttgatattatcacttcaagcattcttggtgagttccattcgcttccgaaatacgatcggaagtaaggagttgtggtgttctgtgctcgcttccacttgcttgaattccattcgccttttaaccttccaatcttccaatctttcgacccaatcgcgtcgccatcacaaaaccgcaggtggctaaccatgtactgagttcgcaagagcttttctttatttcagtcaatcatctttagattgtcttggcctgggaccagcccgtcgcgcgatttcagtctgttctgcaatcccaagcgctgcgataacatcggcaacgacgccgaaccaaaccatgtcaactcacgcactgaggatctaaattcgttccatttctgcccgtccgaagcgaccaccgagatcgagtatccggccctcaaatccgaccgcttgtttggcgctgggacgtctagcatgatgcgttaatgatcctacctgaacaaccccgaaaaccaccttcgtccgaacctcccctggacgtcgcagtcgagacagcgggatataactgcaattaatagccagatccagtgcatcgggcatcacaatggatggacgtcaacagtatgtcccggggcccccgccttcctctcagacacaacaacatatgaacctgcctccccctccacctcgacatccacaagcccaaacgctggtgccaccacctcctcctggcccgccccctggcccgcctccaggagcgacctatggaactccgacaggatggcagcaaaactgggccagaccggcgctgaacccaggcttcccaccgccgccccctcttgcccccgcaccaaaccagcatctaacatacggtcgcccaccagcgcacttgtcgatcgttcctccgcgccatgaccatcagcctctgacatccgcaacttatatacccgggaacgatactattggcgtcggcattccggggttgttcgaccccaatggaagagctcatccgtacgcgcacaccaatgccgagagacaacggttgggtctcagccaaatgcaagatcacatcaatactccaaccccgtataaaccagatacaagtcttccgcagagccccggggcccgcaccgtttcttcgccgtacgctcttcataacaacattcatgaattaacgtccaacgacagtccgcagcaacaggcgacagctccaactaccgagcttactaaaacgacaagtcatcgttacaatgctagcggtacttcgctgggcggtttatctcacagcgaagcggcgatccagtggccattggatcgcgtgctcatctggcttgcgaaaaatggattttccaacgactggcaggaaacattcaaatctttggagcttgaaggggctgacttcctcgaacttggacatggatccggcggacgaggaaacctcgggaaaatgcatcaagtggtttatcctcaattgtccaaggaggttggccggagtggcaaaaaatgggaacctggccgggaacgagatgaagggaagcgtatgcgcaaactcatccgtcaaatacatgatggttcgcaagactacaccgtcactaccccactgaatcagacgcagccgccggcgactgcgttccctgagaacagtgcggcttacttttcttctaaattttccgagccacgttcggctggccctatccctggtgtcaatgatgtgagtcaggatcatctgagtgcattgcacgcctccaatcaagcccaaaagcagcctgggcaacgctcggttaccatgccggtctctgctggccacgattcgcctagaaaaaatgagtctccggcacgagaaaactgggcgcgatctgactattcgcggtcagagtatacccgcaatgccctatccggaataaacagcgaccatcgacgccagagttcgtccattggcagcgaatcgggcaattttcagggagcatctcttcggccacatgaagaaagtccaattagtggcagcccagccatgcagaatgtgtcacccgcttatgcaggagcattttcatcatccactggggatctgacgttgagaccgtatgatcactctcggggcaatagcaccgaatcgatcaatcggggcgctacaggccggtactacgattcacgtagacaaggccatgaacatgaatctcgcaggctaggccaagagggtactcgtccctcgcctcaagatgcctccagtcgacaatggaatgaccaaacctcgtcttcgtactccaaagaacacaagggctttttctctaatattctgaagaagaagacaagaactacggcttctagccacccgtcccccgatcatcagcatgaagactcgtcgcctacgacaagcccggagactcgcccgaatgaagcctatctcccttacataaagccttcttacaacactagcgacatgtcggtcggtgagcgtccatccacggcgataacaaggacaaagaaatggatatttgccaccacggatggcttgaactaccgtctgattgacatcaccgatctcgactctttcgagtcattgcgtaccgggatctgtgaaagcctctcgatcgacccgagcaatgcgcagatttaccttactcagcccgggcaaagcgagcatgatgatcctatgagtgacgcataccttgcacagtcgcgtcgaaacaagtcagatgcatacggttctctcaagctgtttgtacgagggactcctatgcttcctatgccaccccatactcctcgagttgatggcttgggagtttctttcatagaaaagtccaatatgtccccgacggcaacacaccaccaggtccaccggaagcccttggatgaagatgcccttaacaggttatcaccgcaccgcaccagaccagagtctccattgttgggctctcggcaaagcactctcaaggcttctacagggaagccatccccggcggagaccgtacaggacgcaagccaagctcttgggtctgacaaatccgatttactcgctcgccatgaggaacacctccgtgaggtcgaacgtaaacaaaaacaatatttacaatctaaaatgccgctgcaaaacaagaacgcctacagtgacaccgggtacaggcgaaacgaagtcattgactttgatagtcctcgtatatcgccttatgacgaaaagaagggagattcgcttgtaccacttcgtaaacctcccacagcgccaatcgagtccaacactcttaccaaggtcaattctctcagcaggagacccaccactcgtgaacctcgtgaagctcggatacagccgtccctgggcgctgcaattgctagcgttggccgcattacaagtgcagttggcacgccattgccttcggtaccggctccatctacgccttcagccaacactcaaaacagtgcaatctccgagtctgatcgaccaggggcatttgattctggaaccttttcaagcagaacacccctgggtcagtacatgcacgacacagcgcggtctgatcgaccttcctctgactaccttccagactcttcgagacccacttcgaagatgactacagaacgcgagaaaccgccagtctcgtttgccgatcagtcacccgaaaaggcttttggtgaagactcgccgagacctggcttgcaaactcgcaagtcgttcggtccagagttcgactttgaagagaatcaagtatccttccagcgaaccccccaacagcagcaagactcagatgacgattctgatgatgactcggacgatggcctattccaagtccgaccttcaagggttcaggaagaaccgaaacaaacacaaaccgaggccgaaaagaaggcggagaggccatcgctgaccgtgaacacgaaagatcaattaagatcaaagttatctgtcaggttcaaatctccgagtactgccggtcctagttccggcggagaggcatctgatgggaaggaaccggtttccagtacctggggaccagtctcgcctgaagatgagaggcctggaccacagcgagagtcatttgctcgagatatctgggcaagcagacctgccgtcgaaggcgttattgaccacctcgatgacttcttccctgatgttgatcttgacgctccatacttggatgagccctcatcacccagtagcaagactatcaacgaacatgacgcgaacctcaaagacaagaaggaagtaccgccacccatgccaaatgcaccccatgcgcctgatacagcgccagtgagaccgcccgaacctgccaactttgctcgacagaaacttgctcgtggtggtgtcggtggcggcggactctctcgcatgaaatctattcgacaggtggcccaaggagcgaaccggacgaacagcgttcatgctggtccgcaaaggtcgggtgatcttctacgccgaaagagtaccaagatgttcggcgccaaaattatgcaaatcaggccgaggccaggtacccggcttagccaactcgatccgattccgcaaaacagcgcccaactggcgtccaatgccgggcctgttcctcagcgacagcccactttccgcattatccgtggtcagctcatcggcaagggtacttacggtcgcgtatacctaggcatgaacgccgacaatggtgaagttttggcagtcaaactggttgagatcaatccgcgaattgcaggggcagacaaagaccgcatcaaggagatggtcgctgccctggaccaggagatcgacacgatgcagcacctcgaacaccctaacatcgtgcagtatcttggatgcgagcgcggcgaattttccatctccatctacctcgagtatatctccggtggatctgtcggaagctgtctgcgcaagcacggcaaattcgaagaaagtgtggtgagatcactgacgcggcagaccctggacggactggcatacctgcacgacaagggaatcctccaccgcgacctgaaagcagacaacatcctcctggatctcgatggcacgtgcaagatctctgactttggtatatctaagaaaacggacgacatctacggcaatgactcgtccaactccatgcagggctccgtcttttggatggccccggaggtcatccagtcacagggtcaaggctacagtgccaaggtcgatatctggtcccttggctgtgtggtgctggagatgttcgcgggccgtcgaccgtggagcaaggaggaggctatcggcgctatcttcaaactcggcagtctgagccaggctccaccgattccggatgatgtttctatgaacattagtcctgcggctcttgcattcatgtatgattgcttcacaatgtatgtcttcgtctgatttgttcttggatcgcctgattatatttactaacgtcctccagtgactcggctgaacgtcctactgccggaaccctgctcacccgccatcccttctgcgagtcggatccgaactacaacttcctagatacggaattgtattccaagattcgcgatgttctttgagttcccttggtttgatttcttctttgactgggttcggcgtaacttaacgactttgcgctttctcctatcgaccgtacatacccttttcttttacatgcttgaggccaaatttcgtctggattctttcggctttctgatcagctgtacatacttttttcacgtttgtggataataacatttaccggggaaactagattatttccctctttacggtccaattgtgatacgctacaatatcatcaagctgctatgaccaaccaacaagaatttatacaattcctcgctttagacatgtacagaagtgctcaattcaacatggtatctatgctcaagaaggggatataaaacaaaaaggtcataagaacgagtccaatcctaagagctggtgcttaggagatcatcatcgtcctcggggatatcggcctgcaacccagcgacaccgacgcggaacacaccctcacaccattcggcaaaggtattaacatcccagacagcatcgtcccgacccttccctttcttactaacaaaattgcccttcgccttctcggaggaagtatacttttcaaagaaatcctcgtaaatctgaatagtgcggtcctggaccgccccaacaagcgtctctttcatacgcgtgtcgtcgatatactcattcaagaccttgcgcaaacccggcacctccttctcgatagtgcggcaagaaggaaggataagttcgccgcgggcaaggttacgggaatcgatgaattgagccggcagcgaggcggtcatgcgagcagcaaaggcattgatgaagtcattgataaccgtgcgaaggcgaccatcaagctcgactttcgcgtcgagcatgttctccacgacccgcgggatgaggccgtggcccaccaggcgcatcagattacgcgggttgaagaggccgccgcgttcgcgcagctcccagaatgtacttgtcatgccggagaagtcgaaggagatatcggcggagacatattcgatgtcgaaggcgacgatttgttgctttaggattaggaggtggctcattaggaagagttggctgtcggctggtgtggctttggcggctattagggtgctagcgttttggagagagagggttgtttggtgcacgatttggtgagctaaatcgtcgaagacagtggactagggtggtcagtatgggtgggtaattaggcctgttgcggggaggcatcttacattcactaggcggtatattcgactcagaagccatattgcttttcgcagggttggataccagcccttcagagcggtctgcgtctcaaagtcccatttaccgtctagctcttgtgtagattcgcctgtgtcatcgccttgtttggccgtcatgtcgactagtgtatccgcggatgtgtccttcttgcccgatatctgagtatctgacacagttagggatacctgtcgatttcgcatggggtaatcagtgtcctctgggcgaggtttgtatcgttcgatttcgtcgcgcagaacagctagagcacggaagacaagccgggcctggacgtcttgtaaagcgggctggatcaaaatagaaaagtcaagatggttcgtttcaacctgttcgagttcttcttctgggtccgagaaatagcgagtctgcagtagattgcacagctgacatagtctgacgatatcagactcgtgaatgatccgtggacgaaggtgatcataaagtggttcgcatagcgtctcaaggaagtcatataaacctccctgtccgtggaaccattctccccatagatcatattcgtctaggcataggccacggatataactgatgctagctcgagcaaaggcaaccaggtccttggacgaactaggtgtctgtgtgatttcgccgagctttttgcgagcgagcggaagtatcagcttcgcacgggtagccgagtaattgctgtgcagctcgttcatcaggctttgatattcagcttcgttattttgatctgggttgagcggtggtacggctctcttttgaatctcgactccaatctgcttcagttcaggtgccccaaccctaaatttagcgtacaggagagccgacagagctgtgtcattcaattgctgatccgatatctttttggagacgctctggtgaatatccttaagtgaagatacaaagttgccgcggataagcgtcaaggcacgcgttagcagtagccggtatctcgagcgatatacctctgcctctttttgatccggctgcgtagagatcagcgatgcgcatgaatatccccgacttgcttactcacatgtgtttccatgtaatccaagcacacgtccagatgcctcaacatatctgagaattccttgtcgcgaactgtattacccgcgccgggagcattcaaccgccgcgatgcgggatctaagaagtcataatagtggaggttggtctggataccattcgcaagtttcgtatcccgttcctgggcagacaaaaggccttggcattgcttctcgaaattcgatgtttgtgtctcgaccgatttgaatgattcggacaagctggataggtcacccagaagggtcagggtgttcgttaagatttcgtcaatgtgctctttcgattgttcaagttcatccaagcaattcctttaaagaaatgaattagtacgcctccgataaccgtccaatgtcaatcgtactggtactcgtcatagctctcctcaatcaagtcacccttgacaccattaaaccactgtgaaaactcaagttcgttgctccatcctgccgttttccattcaaaagcaccgggcggcttctcgtccaatgcttggaggcttgattgggtttctttggcggtgggtttgcgcggcgggccggagggagcggtttggcggcgggcacgctgctgctttgtggaaggcatagtgtggtcaaggcccagagagtgcgatgggagtcaacctgcagctcatatctctctaccgactttattctgagtaaaattcaggccaagtttgatgttgaagccgaactgcgatgtgttcaactccgagacggattctgccgatagctcccgcctagattgctgcaacaaatcacaggcccggcattaagagcttccccggacataatctcacctttccagcttcggtatgctctacctggtgattcagcaataatctacaatgttcacaacccaactgcgacggcccgcgacgcactccgtcctcgctttccgcccactcagaaactcgacggctcagtcactaaatgcgccatggtcccgatctgccagcagtaaatcgcgaaaggcaggcccgtcatcgcactggattcgcaattccctcgggtttgccgtgacaggaactgcagtctttttgggatactcatacgtggctgatggtggaaaggaggcttggttcagtcgtccgcaggttataaagaaagagcccgttgacgtcaacgatctcgaagctcagttcgtccaagaaaaacgaagcctgaaaagccccggcgtctacacatgggggtcgaacgtttatcgcgtggtggatccaggatctaaagataccgatatcaagactcctcggcgcttcaaatactttaatggccaggttctgagggatctcaagatcgaggaaaagtccggtgcagcaatcaccgagaatggagatctagtgcaatggggccaggcgttctcggagtcggacttcaaacccacggtaactctgactggcaggaatctcacctcactcgttctgtccgaaagtcgaatcattgcgctgtcctcggatgggactgtatactcactgcccacatccaaggatgggcaaaacaccggcccaaagacaacggaaagctcttgggttcccttctggcccaatcagtctaatctgagctaccgtgtactgaacccatctttgaagcttggtgaaaaggtcaccgcaatcagtggaggacaggaacatgtgctgcttctcacaagctctggtcgagtcttctctgcggcgtcatccaccgaaaattacccttcgctaggtcaactcggtgtggagggacttacctggttcaccagacccaaggggccagcagataaatgccatgaagttacagctctcaaaggctccaagattgtgcaaattgcctgtggtgactaccactcactggcgctaagcaaagatggccgtatgtttggctttggcgacaactcatttggccaactaggtgtggattttgaagctgagaggtctttcaaggatgctcctttcgaaatcaaggctcaaaaactctatagcagaaaccgctatctgcccaaggttaccagcattgctgctggtggcgccaacaccttcttctccgttgatgccaagcgcattctagggtacgaagaagaggcagccgatgttcatgatcttggaaatgtaactgcagacacatgggcctgtggtaggggaatttggggtactctcggcaatggcagatgggttcacctgcaggattcgcctaccaaggtgaaagctttaagtggtgtgagcgagtatgacgagaagacaaaacaaatgacccctatccgcattaggtccatgtctgtcggtacaacacatgtcgcggctatcctggacaacaagaccaatgtcaccaagactatcaaggacactttggatcaaactaaagactggggctatgatgtactctggtggggaggcaacgagcatttccagctggggacaggaaagcgaagcaatcaatccaagcctacttacatcaacgcaccccccgaaaacaagaaaagccagggcgaggcgcgattgcagatcatgcctcgtcacaagggcaaggtcgggaagcgcaatgtgagcatggaacagcgtgttgaatgtgggcgtcatgtctctgccatttattctgcggtgtaaaggtaaaaaaaaaaacctgtatattagtgatgccatatgaaatgcaattataattcgctttactcggtcggcctgttgtttttcttttggtctatagaatcaatcaatggatggcggcaattgcaaacagaccaaacgcttatcaccgcggagacgcttggaccaccgcttatccaaaaaatttccagcgcttcaagaccatcttctctcacgacacacctccataatgcctcgtgaacaacaaaaaagaggccgcagggccgagaaaaaagcccaaaaagaggactccaagagaaagttcgaggaaacccccgaagatcccgtcgcgaagcggatgaagccctctgccgacgacaccaacgagaccaacgatgatatccaaattgccggaaatgaggactacattccccttgacccgggcgaagagcaggaagctcagcgacctgatgaggatggagacatgcctttctacggtcttctagacgaggaggagtcagaatacttccagcgcgccaacgaaatgctggagctgaaccagttccaggacgccgaagagcgcagcttgtttgtcgacagtgtatacactgaagctagtggcaaggagttgaaaattgcctgcagtcagggctgttcgcgactcatggagaaattgatctcaatgtccgacgctcgacaattgcgccggatattcagcaaatttatcggccacttcctccacctagtgcagcatcgttttgcgagtcattgctgtgagacgcttttcattcacgctgcgcctgccgtgatgcaaaaggtgaaacctcagcccaaaaagtcagacgaggaaggagaggaagagccggagctatcgatcgcagaaatgttcatggctgttattgaggaattgaaggaaaattgggggtacctgttgacggagcgctttgcgtcgcatacaatccgagtgctactgcttgttcttgcgggcgagccggtggatgtcacgtcaaacgagtcgtttgtcgcaagtcgcaagaaggaaagaattgagatcccgactgtccagggcgaagagaaggcagcaaaatccaaagccgagaaacacactgttccagagacattcgaaccggcgctcaagaagatcatgaccgatatggttgccggtctcgacgatgtttatctccgagctctagctacgcacccagttggaaaccccgtacttcaggtattgttgttcttggaactttcgcatttcggaaagtctagcgccaaagatcccaagtcgaccatccggagactggttcccgatgagacgtttgaggaagattccgaaagcgctgttttcattcgtggtctcctctacgatccagtgggttctcgcctgctagagacgatggtgcgatacctccctggtaaatcattcaaaaacctttacaagaacaacctgggtgaccgaattggttccctttctcgcaatagcactgctggatatgttgttcttcggatgctcgaaagactcggtaaggatgacttgaagatcgccatgaccaacatcatccccgaaattccgggcctaattgaacggtcaagactgattgttcccaaaatgttgatcgagcggtgtgtggtccgtggcgtcgacacaaagcctcttgccgaagcactcgagggtgcttatagccaggaccctgttgtcagactgcagcagatgctcaagttcaacatctcggagaacacagccccggaacctgaagaccatgatatggacgaggacaacgatggaaaggaccgcaagccacggggcccacccccagtatctgcggcggagaaagccgagaaactgcatggctctctgttagtacaggccatgttgaccgttcctggcccgctgagccaacttgtctacacgagtctcctcgcccaatcatccgaaaccatcgtacaacttgcccaagaacccacctcttcccgcgttctccaacaggctctgacttctacaacctccacgcctcaaatccggcgacaactcaccacccgtttccagggtcatctcacacctcttgccttgagcagcagcgggtcacacgtagtggatgcgctttggactgcaaccaaggacatcttctttgtcaaggagcgcatggcgcaagaactcgagcagcatgaacaggagctccgtgactcctttgttggtcgtgcagtctggcgaaactggtcaatggatctcttcaagcgccgccgacgcgattggactcacaaggccaagggctttgaggagcgaaccgaggccagtgaaggtgccgaacgtcccaagtctaaactagaacaggcccgggcccgttatgcggcagcaaaggaagcagccgatgctggtgctactggtgcaaaccagactgcggtggctagcagatgaagtggtacaatggtgatcaaaaatttatattagacgaaatgcacatgtactcataaaaaggcgttgatgcattcaattgtttcattgctttatatctatttccatacctttcttatgaatcgatattatatttcaaaacatatcagagatatcttagaaaattgataaattgtatatagttcatcgaccacaataccgtgagggtattcgggttcctgcagatcagcccgaatcttaatatccttgtctgcatataatatatgcaaggaatctacggagtagttaattgggagtatacaaactcaaaactacatgaaaatccgactcaaaaacattctactagccgagtatagatcatcgcatgagggcttaaggtacggatgatgtcaggctctgcgggattgtcgccatttccgtggtcgccggtaaacttttctttccttttcaattgcgtcttctgtcctctttttcttttctgtttcttctgtatagaatttgcactgtctctccttaaatttgcatatactagaacgtgagaatctgtacaaatgtctggcattgcgcagcccaatcgcgctgatgaagtgcaaagtgtgagtcaactctatatcgcaatgatctacaccccaccagattctttattcgatgttctgaaactaatgcgagcaccatgctcagcttctgaaagcggtggaagaccttctcatcccctttatccgatccgcagacgaggatccccgcgggtccttgacacagaaaaatggcaccaacggcaccaatggacacactggactcgttggaacctcattgatagattataagaagcctgaagagctgcaggatatccttcagcttgagatcccagagaaaggcaccaagcaggaaggtctcattgaagtcttgaaaaaggttctgcaatactcggtcaacacctggcaccagggatttttggacaagctgtatgcgtcaaccaatgcgcccggcgtggcagcagagctcatacttgctaccttgaacaccaacgtacacgtctaccaagtgtcccctgcgctgacggtcattgagaaatataccggccagcggttggcgaacctcttcgggctgaacggtccacaggcgggaggcatttccgtgcagggcggatccgcatcgaacaccacctccattgtcattgcgcgaaacaacctataccccagcacgaagacagacgggaacggcgggtacaagttcgtgctcttcacgagcgcacacggccactacagcgtggaaaaggcagcgcagatgctcgggttcggcagcagtgctgtctggcctgttcctgttgacaaggtcggccgcatgatcccagccgagcttgagaaactggttcagaaggcgcagagcgaaggccggacgccgttctatgtcaatgccaccgcaggcacaaccgtcctaggctctttcgaccccttcaacgaaatcgcagccatttgcgaaaaatacaacctgtggttccacattgacggatcctggggtggctcgttcgttttctcccagcgccagaagcataagctagctggcgcagagaaagcaaacagcatcggcattaatccgcacaaaatgcttggcgttccggtcacctgctcttacctgctagcctcggatatacgccagttccacaaggccaacacacttcccgcggggtacctattccacagcgaagaagacgagcccgctaccaacggcgacgcaaacaaagaatccgagttggaagtcgactcaccggaagtgtgggatctagcagacctcactctccaatgtggtcgacgtgcggattcgttgaagctgtttttgggttggacatactatggcaatgagggctaccgacagcagatcgactcggcatgcgacatcgctgcgcacttggctaataccatcgcgcaacatcctgatttcgttcttattagcgaaaaccctccgccctgtctgcaggtgtgcttttactacgcgccaggcaagaagttcgtgtacccgcgtggcatcgtctcgaatgagacacagcgcgggaagaataacagcaaggtcactgagcaggtgacgcgtgcaatcgtgcccaagggcttcatggtggactttgcgcctcccagtggagaggaggacgaggatgcagctgggaatgggaagttcttccggtgcgtggtgaatgtccagacgacgaaggagaccgttgattcgcttatccgcgccatcgaagaggtgggtcctggtattattgagtctttgaaggcgagcaacccggcgcttccgcacaagcggcctggtgagcgtggacacggacctgttgtccatcgcgcttgagcaggtgcgtgatttgttttcttctgatttacttggtatataaagtagagcatgtggatatgagagatgggatacgacatacaaaagatctggtgaaatatataaagctgtgtatcaatttgacaccctaagaacaagatgagcgaatatctcggcgctcaaaatgcagaggatgtagagcagtcggcatagtttctaactatacctacctggacagtagtaatagaatttgtgcaaggagaatagcttgagtatagaatgatatcaaagccatcaattgccaatctcgacccttcgctccaacacggaccgagcctcagcttccgatagagagtcaatctctaattcagcaagcacagcccgtgcactctcgttgtccctgaacaacctcttttccacatcccatagccttaaaggcacatcttcctctgtagagacgtccccctcttgcttagctgtacttaagcaaagtatacgcagtccctcgttgagctttttgatggttcgcaatgagatccccacctggctagatgcgccgagcgcagaatccacaacgtgacagagatagtcgacatcgctcgcaagctgggccgctccagtctcggaaaaggtatgtttggtcaagacgttgtcccagatattgctctggatcgataacaggagctggcgcgagactcgtcgtagaggcgcagttccgagcgcccgagagaggaaggatagttgtgcggacaagacacgcattgcaggggcgagatcagaagtgggtgggaggggagatgccgtcgctgtggcagaagggggtgacagcgttgcccacgtagatacacgagagtagggcttcagagccgcgaagatattagaggacaaggtggatgtgatgatagtttccgagcgaagtcggagacgacggtaggcggatgccgtctcatcgaagagagcaccatcggatgaggtcgcggtgtggccgccgttgttgttattagcgactgcgggtgacgtacgcgacgctacctctgcgacagacatagtaccagctacgctgcgaccgttgtctcggttttgttgaacccgatcttggagctcggaccagagctcaacgaagaacacatcattactccaatcctccatcttcttttcgaggtattcggcacttccgaaaaccctacaaagccgctccagtccggcgacaccctcgacgctggcttgcccatcggcgccctgtacagtgcgtccaagcgttgacgtcatcgcaaggtaggcctctagtgcagaatagaggcgctcatggaactggtcgaaaatcgtgatttgaatgtcaatgagaaaccgcagcttctgactaaaggaggatagtggtcgatagcgatcggttatagtttcgagaaggtcattcacgcggatcgcagcctttgtcggtttcgttgcagtgagctccatgccatcgtagtcgatctctccactgtccgcggtgtcgatgatatctctgtatcgcgccaatgcgaagttcttctcaacctgaagccatcgatcataccagccctgtttggtcaacacttcccaggttatgcccttccaattgtcgtccgcatatggatctggcgtatagttccatgtttctcgcatctcgttatcgaatttcatcagttcatgaatgaattggctgagcaattgggggtagtttgagatttgagggaggaacaggctgatcttatctctcagcataggaagcaatgcagtaatgtaactatgtgatgcattgtaaaagttccattctagacttggaccgactgcttcggccctttcatcaaagatgggctgcaagtaagacacaaaaaacccgccgtattggttgacaaggtccatgatgtgcgagaggaaatattccggctagaacccaagttagacttctattttgcgtagagctagggacaagttaccttatccagtcggtttgttggcttgtctccactaaagtgatatttgaagcggagatcgagatgatgcaccataacctctagtgggaatagcactggtggctcgaagttcagttcggaagctagtgcatcccggctttggagttcactaaaaggggcgtgttagaacatttcccagacatgaagggacataccatacggtaattgtaagtcgatcaacagttcaacatcttgcctccagcggctcaggagctggtcggtgacattcagttctcttgtcggccatttcatatcttccagcgttttctgtagccggtcaccaaagtatttcttcatctgttgtctcagtgcagatgccagtttgtctgtatagtcgacaagatggggggccgctccttcggcagcaggctgggcatccttcagtagtccgacgatagttcgtagtcgggaataaggcttcaaagcggcgcgtggttcggatgtaatgtcttccaaagcttgcttgctgtattgctgtctcagtatgaagtccctcacgaatgatcaagtgggcactacctcaattcctcggcttccttgagcaactccacatatcccttggataattcaagccgctggagcttctccatgctcttctccaaactccgtactgcctcatcactggtttcggattgtgtgatggccattaaacgtcggtcgatgtccgcttgctccgcagtgaacgcctcggcttgctttcgagtggcttcggcatggtcattagaggcttttgtcgcatttgagagtgcttcgctggcttccgctagctatttggtcgcgagtttgcatcagtagtgtttagaaagagggtcatggctgtgaggggcggtacctgcttccgctgaagctcctgttgcgcgcgtagactggacaacagcgaatctaaactctccagatcggcagaaacctgaatcttatcatttaaataatcttcgacccgagtccgctcatgcgaagataattccgtgagggaggccattgttgaaggagggaacttgaccgcggaagcgcaaggtgtcgcgaatgttgatctccgccttttggactgacgtcttccccagtggcaaccatgagcttttacattgtcaacactttgaataatgtccagtccagccaagaagcgaaaaagaaatggagaatcatcgcagccgacgcgcagtatcaagtcgttctttaaaggacagaccactgaacaagccaatctacaaggccccgatgtcactgagcaaaggctctctgatgaagctcttgcgcgcaagctacaggctgagtggaatgagcaggaaaatgcaagcactcctaccgatgccaaagcagatccacagatcaatccagttccatctacattagactcgcctgttttacccccggtagcgccagtgataccaaggaagagcactctctcattacagtcatcatctggtacggaggatacaatatccctttcgattcctcttgatcaaagccctcagaccttcgacgcgagtaaatacgcagcagaactgcggtcgcactgggcaaccgaaggcggagatgcttcttacgccttgttaacgagagcctttatcctggcaaatgcaacgaccagtcgaataaggattgttgatacgctggtcaactttcttcgagttctgatagaaggtgatccatcaagtgtcctgcctgctgtgtggctcgcaacaaattctatatcacctccatacgatgaattagagctaggcctgggagggtcttcaatttccaaggcactgaaaaagatatacggcctcaatagccaagggctaaagaccctatacgataagcacggcgatgcaggggatgttgcattcgaagccaagaaacgacaatcattcactctggttaagccgaagccattaaggatcaagggggtataccagtcgctgaagaaaatcgccactagcaaaggacctggtagtcaagaaaccaagcagaggatcgtggagaagcttctacaggatgcgcgcggcgccgaggagagtcgatacattgtccggacattggtccagaatctgcgaattggcgcagtcaagacgacgatgctcattgctcttgcacgggctgtcttatatgccaagccagccgaggcagatttcgaggtgcgtccgtcgcatcaacttgcgcgcttgaagaaggacgaacttgcggaaatctacagcaatgcggaagaaatcgtcaaggcgtcgtacgctagacatcctgattacaatgatttggtaccctgcttactagagatcgggcccacagaagagcttttgatcagatgcggcctaaacatgcacattccactaaggccaatgctgggcagcatcacacgcgatctgtcggagatgttgacgaagctccaagaccgagacttcagctgcgagtacaaatatgatggacaacgtgcgcaggtacactgcgacgagcaaggaaaagtttctatcttctcgcgtcatcttgaaatcatgacggagaagtatccagaccttgtgtctttggttccgcaaatacgaggagaaggcgtgtccagttttatcctggagggggaagtagttgctgtggaccgtgagaatggcgatcttaagccatttcaagttctgaccaatcgtgcaaagaagaacgttgaaatcggagacatcaaagtcaatgtctgtcttttcgcattcgacctaatgtatctcaacggggagcctttgctagatcgcccctttcgagaacgccgcgagctacttcgcagtctctttgtagagattccacaacacttcggctgggtgaagagcatagatgcgacatcggcagattctgagcctgtccttgaattcttcaaatccgccctcgacgtcaagtgcgagggcatcatggtgaaaatcctcgacaaccagcccggcgcgaatacccaagtgaacaacctctcccccgaaacagatatcacaatcatcgagccatcaaatccagcaacatccgacccaaccaaccccaaacccaaggtaaaactcacccgacgcaaacccctcctctcaacctacgaaccagacaaacgcctcgaatcctggctcaaagtaaaaaaggactacagcacctcctccgaaaccctcgacctaatcccgatagccgggtggcacggccaaggccgcaaagcgaaatggtggtccccaatcctcctagcagtccgcaacccagaaaccggctccctggaagccgtaacgaaatgcatgtccggtttcacggacaaattctaccaaagcaacaaggaaaagtacgcgcagggcagcacaaacgtcatctcgcgtcccagctacgtcgagtaccacggcgaaccagacgtgtggtttgagccgtgcgaggtgtgggaaatggctttcgcggatatcacgctcagtcctacgtatccagctgctatcgggctggttagcgaggagcgcgggttaagtctgcgcttcccgcgatttatcggcgttcgtgaggataagtctattgacgaggctacctcgtcggattatctggcgttgctgtggcggaagcagatggagcggacggcggaggctcggggcgttggggaggttctggaggaggggatggagtagacaaggttatttgcctgttcatataaacaagctcatgtgaattgcctttcttggtactccatgcagcacctttgactgcaagaatagaccttctatgatctaataatatcggagatgctatatacatctcaacatccccctcactccgtaagtgtaaactattctcaatggtatatttccctttgaaatattttttgtcgacatggccccgtgtaaaccatttcgatatcttcctctctacgcgctctaataacctccgtgctagtggcggaatccaagcaaaataggcttcagatgacatcacatttgactttcagtcccctcacctctgattggctgaccccaaagcttcttaatctgcgacgcgaaagtgacgcgaaaagacgcgaccggattggacgtgaaaatgaggggttgactacgtggtccaaagaaaatagtcgcttccaggcgatcagagatagggaagtctgtgtctatgctgggatgctatgccgctccagggtgatctaaattaagatgtgtagtagggtttaggtgttgtggtaataagcattggacctcatttctcgaggttgaacatattccattcatcctgtgtctccttatatcaacagagatattaaacagtctcatcaagggcatggtgttaaaaaaaaatagggtgaacagtgagattgccgaccgacggcagacaatggcatagaaaaagtaagacatatgtctttgctgaaggagagggtaatgaaagacatgatagcaaagcatttgtaaagacaacgcctgtggatgcaagtccgggtagaccttcccaatcgagaatcatgtctgtcttcgagacagcgagcctgtacactggagaagagggcaaattacataggggatgaacacaatgtgtatacaacattattataacaaagtcgtcagtggggtttaagagggaggtagggcaaaaatgaacagagaagagaagatgtaaagacgttgggcatcatgggtgcagttcgccgccgagttgtaacgccagccccgtttccttgctacggagtcgagggctggagttgcttggaggaaccagggcatcgaagttcaatcgcttcctgctgctggtgagcggagtgcgagcagggttgcctggggtacggctactccaggttggctgcgccgggctcggggtcacattcacgaaatcagcgaaattgaattgctgattgggtgtgctgatgttggcaaacatgccagcgcccagtgtaggtgtcatgcctggcagcagcgcgtgctggctgggaggagtggaaggagggaaggccaggtttccgttgccccttgcaacccgagcaggggtcggagagttggcgaggtacaaaagcaaatccgcaccatcctcgtggttctgaggttggttgttccgggacaatcgcatatgttttgggggaggggttcgtggaggagaggagcctatgacggagctgatgtgttggaaactgtgtacaggcagatcgggatcgatctcttctgacggtctggggtatacaggcgatgacacctccgggattatagcctcagacatgaaggggagttgtgtgcgtcggctcggacggtgtcggttcatgcctggggaggattccggcagccggtgagaactcttccacgagacccggtgtaccttggcaggacgctcggaatcagagtcagaccgtaagcgctttcgactcgcggtcagcatcggctgcatgactcgagagttgaaggtggcagcatgtttgttgcgggcggatcgagggagctctttagagtaggtagaggcttggaggggaggagaggtgaacggggtctcgcagcgactgcgtgagaactcggatgaagagtcggaaggcttgtcagtctcaagaactggtctgccatcgtgctggtgcgggttcaggccatgcaatcgaccgtgttggtacttgagtttggcaaggcccaagcgatcctgcagactgagagaaacctgtgcgaagagaatccagggtcagtcccacatcaccaacgatatcatttggaagcattcagatgcagtggcaagtatttagactagtagccgagactgcatctcaagggatgcggagcctctttttttttcatcgcttacctgggcgatatcgattttgcggatcgttttttctgccgagcccggctgtgagggagacattgtgtaaggaacccaatcgaaataatcaaactaaacaagacacccctatgcaagaaaaaaagaagacgttttgaagagagtgtcgatgttggggtttggggggagtaagggcgaaagggaagggtgagagattggcgaattgcgggaactcggagaccaaatctggagaagcacttgaacagattgggatggaaagatgaaagaaacccatttttattcgctggacggtgttaaacataagacatggggcagaaatgtgtctctttgtttcttattttgaagtctcttgaatctgtctttctagatctactctgaatatgaactattccgtatgtacggggtacggggaagtgtgtactccgtttacaggtagaccacgacctctatatagtccatgcgatcactacccagctgtttattcttgttgattctttgatgtgagagggtgctccccaattgagctccatcacgcactttttatactccatccaatctcagggtcttctcccagaacaagaatgttctttttccgattcggcgatctccatagaaaccagacattcagccacagattgcgatccacttggactggggaatgaggtcgtcactcccctgaggtatgccctagatcgccggatgcaatttatatacttacgtgtacgcaatatccaattcaatcccatgcgaatcgcaccccatagcaagaaagaaaaacgccattggtattgaggctgtgagacggatttagccatgcatgcagccctgttatcaaccccgttaagattctaatcttggaagagatgtgggaggacgattttaacaggagccacctacgtaacgccgtaaatcaagagtctccagatatgcagcataacgtcaggaagcctgtaggaaactaaaaagtacagatggccatggacatgccgtgttcatagcccggtatgtgagcccctcgcacgctccaagctaagaacattagcgatccccgatccacagtgaaacattgacttaaaagggttggagctgagctgataacagccttgggaggcataatgcggtttgggcgcggattgaggtacgtaatgtcgatgtagttaattaatattctggaactagagggggaaatctcagatcggcttttctttctttcatcttctcaaatcaacttcattttgaccatatcaaccagaatccatcccctttccccctatttggtgacttgcggggcgacttgtcgtcaaccgcaaacggttaccctgttcctgacaatttaaccccgtctgaaaaaaataacatcggggcagcttcgtccttctctctcctctcaacctcgccatgccgttcttcaaagacctacggcgtcgatcgaaggccacttttcacaagaccccatctcatagtgtggaggaggtctccgggaaatcgtcatccacaatcgacacttcctcccacaactccatcactccaccgtcatcaatcagaccaaccctttcaacccctagtcttccagcactcaatgagtctgaaaccaccagcacagccagcttggcaccgccgtcacagcgcccggggcctttagcgaccggttcgcagcgaaacagcgttatcgtacgtccaccctcattccccgcgacagctgaccatactgaccctgatcgcttgagaaaacagggtagcagctcgtcctcggtcaatggcacgtaccgatcacaggctccggtctcgccttatgcaccgagagtggtgtctgtggcggataattcatgggtatgtttctctgtccggcacgaattggaggccgatagtgttccggtgacatgaaatcaggtatctaactatcatgcaggtcaaccaaaaagtcctgctcgtctatggtcaaatcaacgacccaaggcaacagccgctcgacggaaacatcaccgtctatcaccaccaagataatttcccgtcgactggctggcccgtcacggcatcgcattttaaagtccttgttcacctagttcccggtcctaatcgccttcgctttgattttgtttcgccaaaattgtccacggggagcattcaccccgccatccactcctcctggctttgcattaactaccttcctctggttaacaaccccccattgcagctagtcgttctcctggggaaagattcagacggcacatacgatgcagtaccggaaagggtagagcgcgaaggaaacgggttggaaatggccattcgaaagtaccgcatggctgcctatctctggcaggccttcactggcgaacagatgttccgcaataatttcggccgacgttgtttccgattcgaggaagagtggcagtctggtagcttgagccgtcgcgactcggcccaaggtcagatgcggaatgaggccaagattcacgtagtccgcactgagaaaacagtcgccgaactccgggatcttaacatcgctcagcagaatgggaaagccgagaagaaagacgagttgttcgccattgctaaagacgcggtgcgaaatcatttccggccccaggccggccagaagcaatacgtctccgttctcctcctcgattctcattgggataccgaatctcagatgatcaccggccatgcagctttaggttcggctgacagcgatatcaaaatggctatatttgggtctcattgtctccaaagctatccatcgtgtctggaagaagtcgtggatgcgttctcagactgcacccgcacggataccaactacgtcgccaatgactgtggtgaggcgggctccaattgggagtcagcaaatctgggcatcggggctcacatgcacgaggtgggccatctcttcggatgtcctcaccaggagtcgggcgtcatgcttcgcgattatgtgcgtttgaaccggacattcctaacccgagagccgttctcaacacgtacaaaggcacaagggttgaaggtgtgtttgcccaacgacgagtgtagctggcaccgcctcgatgccctacgcttccgattccaccccagcttccgactcccaagcgatccttctcccccttcggatgatagcgtccacgtgtggccagtcgagaacggcaagatattgttcactgcctcatcggggatagaattcatggagctatatgccgagggtgacaccctctgccacaacttcatcgagtacttgaacagtgagtcgagccccaacggactaccacgacaagttgccgtgacggagatcgagcttcgtcaacgtgtgtatggcactgagaaggaaaagaaaaagaacatccgtatggttgtctgctctggtgcactgggcagctatacggttgagaacattggcgatctgaaatcgaaaaattctctcgtcaaattgcccaaaggccggtctggttttaaaagcggcaaattaggccagtcggcgatggaaggcagcgaacccgagcagttgttactggaatatgcgttcatcaattcaaagctcttgacatcgatcaaggtctaccatggctttgcgctggatggtatcgagttctgctacgaagatgcgaccagtcagctgtttggcaagcggggaggcaaacctggtggtgatgagttcgtcctggatacccgacgtggggaagttctccttgggttctatgtccgagctggtctctggattgatggaatcgagattctcacgagtctggggagaaaatcgggtatctatggaaaccccgccggtggctcagggtacgtatcccctattacttttctctacatatgaagcatgctaaccaatgtgcaacagccacactttaatccctcccttgggctacaagattgcgggaatctctggttcctgcgcatcatggattgatggattctcattgatcatccagcactgatagcaattgtccaacttttctttcctccgtctctgagaggtcctcatgcctcgaagctagccaaatcccggtgaaccatcgtacagcatggtggactgcgaatgactgcagggcatcctcctcgtccatctcctacaactactaagccttgccttttcttgcatcttttaccctcttttcatccctctgggaacagacaattccgcgttccgcaactggcccttggctactatatacacgaggttccgtcggattttgtttgtgtctatatgttttcttctatttcattttctgtcacacatcggcgtcatcggcgtgttagggtcgcatgtatgcatgctgatattttcttcgacgttagtcccgggtgcatggactacacttattggtaatcatcgagcataccgatggccacacacagcaccactgaatcattttgtaaaggggcatcattcatattggttggatagttcatatagagtaatgtcatgaaaccaccgtcaatgttcgagaatgatccagagtaatcctacactttgtaattaagacgctggtaaatatccacagggtagattccgaattctcacgggcggtcctcatacatctgtccaaacttatctcctgacaacaactcgaaagagacaaaaaaaaaaagaggaacaccggggtcattgaccggaaccctactacacccgcatggaagcatagtactaagtcatgttcacaattacgaactcaaatgacccctcacaatcccaatatctatgattcatgccactgtgggcgaagtctctgtggttaaatccacagccctagaaggatcatacgatctacattcgatgtagcttattatgatcttcggtgcatattcattcctagacagaagcattggccagccaatccggggagggtcgttctccccgttgatccccgttgttgtggagtggaacgagagacggcacaaggaacatatagccatctagccatcagatcaccaatctcccgagagagagacagggactacctaggtatatcggaacctcacgccgattgtcggcgccgggaaacgtttgacacgttcgtgggtatgtaagatatggcggaagggagactagacctttcaacgcaacatgctcaccatatatcatgatatgaatattattgtgtggccccatctgtaaaattggctgtttcatgtcggtatatatattattaaagggatactgaatgaagccctaggccgaaggatgttcgtctatggatagaaagaataatattttgcctagctgagtagttgtgtgaacacccgccgaccccgctataccgcgtgcgaactttgtatctagtttccggagaatataaacgtgccaatcataaggccggaaactcgtcacaaagtagatatccacgttttctaaatacagctccccagccaatcaacgagctttggccctgtgctttggattttttgacacatccccattcagagtgccatatgcacaacgtctatatttacgcgcatcccattcgtgccgacgctgaaccggggtgggaacccccgtgtacatgtacctcccgtcgagaatggggaaatgctcgtggcggaaacgaagctgcgtaagctgtgccgtcattttctttccagagctcggggtgcctgagctcaaggtggccagaccgtttgttggcctgactggctgtttgctagtaaatccactgcaagccagggtagatcggcccctctccccattgccgatccccgatttccgattttcctatatattatgtggctttgggtttttctcttggttgcccttttgcgctaggcgtgtgggttttgcagggggggggggggggggnnnnnnnnnnnnnnnnnnnnnnnnnnnnnnnnnnnnnnnnnnnnnnnnnnnnnnnnnnnnnnnnnnnnnnnnnnnnnnnnnnnnnnnnnnnnnnnnnnnnnnnnnnnnnnnnnnnnnnnnnnnnnnnnnnnnnnnnnnnnnnnnnnnnnnnnnnnnnnnnnnnnnnnnnnnnnnnnnnnnnnnnnnnnnggggggggtccatgggcgggtcggttaggggagcttgatacactgctctgcacatgcacactctccctggacgacctctcaccagaacatcgacagcccgagaatgaatttccctatttagagcagatcacccgcatatacaatactgtattttatacggcgaatttcaataatggcagctccgagcccgagctgccaagcctaccgatccatcccccggaaaactattcttccggctgagagactggtagtcctccgtcgaagctgtttatttttatagaactattagttattggtgagtattagttactcacggtggacccgaagccacaaatgcgggattagggtacagagctttgtacacctttcgcactgtgcggggccaacagctcggcgagactcgtaaaaaactcgggtcagacctgagatgccaacgtgaaatagaggctagagtcctaacgccagaatacgagcgcggtggagatgatcatatgtgctacataagtcaacataagtactaattaggtaactagaatttttatccgtggactcgagtgtctcccgagctagaacccgcgcttggccaaccgctcctacttcctttacagagaagctcgattacttacggagtatctatgtgaaggatgcaatcgctaaagccccatggaatttacagattaaattgcataacgtacggagtactccgaggccagatcagccaataatcgactgtatgctctatccagctattgtttccgattgattccagtgaaatgatgaagacacacaaattcgcactccagacggtattttctgaatttctttttttttctcaactgtggatgtccaacgcagcgtctagcccgtccatttccccccctgttgcatatatcaccaaaaacatccccttatgacggcgtggctttatgctagtcaatctgatcttggggtgatttaagtggataaggcgttcgagtacttacgctgtttgtgttgtcttgaacgctcactagcctcatacgtcagactagtactttactacttttagaaacggatgcacggattccgtgctttagcttcaataacttaaattgagagctcgagtaaggtacagggtacatacgggtaacggtggacgttgttcttaatgcacatggtaaatatacttacagcacgtgctccactgatcattcaagtgcgaatcgagccatattacaggtgggtaggctttccagcaatggcatgtatggactagtattgttttgacgtggtatgtggctgtatgcaaccccacaccagactttacattccataccacctcagtatgtatggatcaaccagctaccttggccatgatgaaccatgttggcatggaaatgggtttaaacttggaatatatagttgacatggtcgctatcgttctggcgcacggtgtgcagagtccctcgtcaacggacccgtgtctatgagccgcgggagaccgatgaaatcatcagcaatatttttttgggattttttgggaagcaccaggagattggattgatagatctccgggcccagtcagttgattccggtggaaaaatgtatatcaaccgaacaatatcagtttgagtgtagatccggtcgggccggccacctatcatagttaaccgctagagattaatagttccacattcctcgttcgcggctgatgtactttgtatgttgtatgctggtatgaggtcaagattcagattggatagatgtggctgtagtgttagatgaatgacggttataagattttaccaaaggaccaaagtacgtatgacctgaatggtatgcataactctattttactgctaccacaacaacatacttatttgccatccaagcaagttacattacctaataagaacgggagatacttctagggttccctccctagagtatccgtggatctgaatcgtcttacaaggacctccatactacgtgttgctaatatatgtatgctgaacacgggggttatatattaggaaggggctatgtctcatatagtactccgtatagacaaccgtatgaatctgaaatatccatgttagaatagaaaggagaacagatgctctgtatataactagtatatatatataataactccatactccgtacgttgaatctacctactccgtacctagtgatatatattgtcatacggagtactcgaaatataatacacacccgtacaatacgtaaatttgcacttcggtctcgctccaatgtcgttttccccactatgtccgcacggctctccggtaactgccaaaggtctccataatgtatttcgctcgaccaatcattttattcgaacaaatatattgtccaatttctttagcagttcgactcttccaggagatttcaaaaaaaaaaagagaagaaaaataaaataaaataaaaaagcctcttaccagaagtggccccctggtcttatcagtttctcccaggtggcgacagctttcctctctctctcctaaaatcttccgagcacatccaatggtttctcctttgtgttaagtccactgtggctcagtggatgacagtttggtgggatctcttatacatctgtcattggagggcctcattgaccgtaccatctttactcttcctttccccatcatcccctcccttagagcattatcccctccttccacccctcgtctctccaataatacatcatttcctccaatctcctataagaaggaaacatagtccattccaaaattggtttggatcggcctacactctatctgccttcacccttttgatctagtcccgcgatcttccgtttctggcgtatttcatttccacacccatctagtcttttcacattcacatcagagaaaattccctagaaccccttgttgcacttcgcacaatctcgaattacctcgaattacctcgaattacctcgaattatccacgacgtacgacctcatccgaacgctttccgaactcgatcaatccacgtcgtgaaaccgaagaccagctgagcacaaccatactggcaggccacaatttacgggtggccataatctgtttcttgccttcactatccaagccaggcgaagcattgataaattaaataatgttcaccaaccggtgagtttgtcgccgcttaacttggtcaatcgtataatggtctgttctaacgttcaagttcgcgcaacaggaacaacacccagaagccggatggtgagttcatcagtcgcttccagcagacattctcagacattgtccctcggcgggacagcacgagtccgcgcaatgtgagggcaggtgaacctttgatggcagggtatgtacattatattctaccaggtaaaatgtccgaggtcagaaactgacattcttgcatagactggccgagaataacgatgtgaaaatggagggtcatgatgtcaagcttcccatcactaacaacgaccgcactccccgaaatatgcatgaacttggcttgacgccctcatggatggaatccgcttcctattcaatgatgcctcttgccaacccgcattcgggcttttatactccaacctcttctggaatgggtgccatgttccataatcaagcgggcgatttgcataccccaacggggatgcacttgatgaccccgttggcgggcatgccggctgtacacaatcaccacagcactggcttcgagcccttccatccgcagttcatgaattcagtgcatggcatgaacccgtacacacagccatcatatgcgccaagcgcattcatgcaccgcgacaccggatatgatgtcatggatgatactctcgatgactcttctttaaatgatgtacgtgttgaaacagcatccaatgtaaccgcctctacggaattttcctctcaattggctggtgacatgtcatatgccaagggcgaaaagtgagtttaatgatccaaatagtaaatgtccgttcaatcctaaccaggttcgcactcatagattccgcttcaatgtttctctacgagcaccgaccgccatggtgaagactctaagtgaaattcccgtgacctatctcaataaaggccaagcctacaatctctcagttgtcgatacaagcccaccaatgctcagccacgaaccggtccgatacagaacattcatccgaatttccttcgaagagcgagaacaacgggcgagaccgtcagcatgttggcaactatggaaggaaggccgtggtaccacagaagcccatcaacggggcgggaaattattggcagttgaatacgtggatccattacaagggggcagtgacgcacacaggaatcgacaggttcaagtcgagagtatgtcagttgacggcttctgcgtcacttggactgccaacccagcgaccggcatatcagattgcaatattcccgtgcggttcaatttcctttccacggatttcagccactcaaaaggcgtcaagggaattcctgttagactgtgcgctaaaaccgagctgttgtccccggacgaggagaccggtctctcgcacgatccagagctgtcttactgcaaagtcaaacttttccgggatcatggtgcggagcggaagctgtcgaacgacgtcgcgcatgttaagaagaccattgataagcttaaacagcaagtctcccaggcagaaatgggtggtggattttcgaagcgcaaacggggaagtaatttctcgggcacctccaagggatcggataattcattgaagccttcgggccacaagcgaacttggtcgatggactcggaaaatacttcagagaaagtttccttggaggacgaccttcaagccaagttgtctacgatgcaagagatgttctcatctactcgctcagtgagcgttttcggtttacgcggtgacaacttcgacgatccggacctatatccgatccacttatcaggtgatagcgattcctctcagtatgggaatacaagtcgttcaagcacacgtgaattagagtctatcatgccttcgccgccgaacaccaatacctcttcttcgaattcgccgcctacccaggcactcagattaggaaaatgccccaccactatccagagggttccttccggcgaccaaatctcaaggggtttcatagaggccatcggtgtagacttgacctaccgacctccgtcggaacaccctctcaagccaagtgagtttctcgcgcgcaacccgtcaatattttcgctaattttcttcgcagttgcatgcttctatgttcgattcactggaaatgtgacgcgctcagaggattactaccgtgcaatctatttgacagaacgcaccgttcgagacctcgtgaagcaaatcaccgagaaatatcacatcgatccgatgcggatctcaaatatcatgcatgcccatgagaagggcctgcgagtcatagtcgatgacgatgtggtccgccagcttccagagggtcaagacatgatcgtcgacatatccgaagcacccggcggtgtttctggcacacccgaatctcctatggagatcaacttaacctattaaaactgcgtcacctacatctcaagcacatgccccggcatctcaaactcgaatatgatgcaaaagtaaaatcttcttttcacatctcacctcgctagccactgtggtctcttcactctggtctgccgcacgaactttccacattgagtgcattcttgcactcatctttgtcgtttcgtgttttcatcttctctaatgggtcggtactttttttcttctgggcgctgaacacggggataataaacgagtctccgagcaacgataccctgttatattatgtttttttgtttttgacatcgttgtgttgaagcttagcgttgcttacccactacgacggtatatgagtcgatgggctatggaactcttgatatatttgtcttttatggttatcatttcgatctggtcgagggccgagcatacgacgttgataccctgtttacctcttttatttccaggtcttctcgtttgatattagccatttttttctttttcttttttcttttctttttgttggttgctggtctgtaccggtcttgagcgttttgactttttctgtgatgtctatctctacccatgtcttatgtcttatgcatatatcattcgatatagatagtctcctgagggactactgaggatgggactgcaagtcagccactcggatgcaagtgctagaatacgatgaccttgctacctcaatttgatcttccatgtaggagtcgtactttgtcctaccttgaacactaggtgtctgagttgttaaactctttaacaactacaccagcaaagctgcagcagccactcaacccctggtaccttggaagactacaaccacatttggtgaccagcactcggtactgaaagttgccaccttaaccgagaatgagaaatatctaacgcttacatagccaccaccttccccccttccaaagtgggccatgcaatcaaaaaagaaacagactaacgcctcacggcccacaagtgattccacaccaacccagtggaacacgcactgtggctttcccattccaagccataaaaaggtaaacaaaatactacccccttccccggttcccaggaacctgggaactatcccacggctggtgaggtcatacctagttttggcagggaagatcgcctggaccgctgtttcgggtcgacataacatcactgattggatgggtcatctcccgtccggttcctgtcaaccaaccaatagcccaggtggcggacggggccgggagtcgtccctgggaattgtaatttcggtacaacatagtaactccaaatcgggagttgcatcgaaatttccagatcgagaatacacaccccacgcttggatcgtatggtacgtatgtttgtcgtgctttgaccttttcatgagtagcactagttaggaaatcggaagcggaactggagcaaaaagacgtcacgtacaactctaattgtgtcaagcttatctaatcttaagcgcgaagtctaactatgtaattaatgctgaagcattcctttcaagactagctttgagaggctatatttcattgccctttgcggttgacgtcttctgataacacggttactttcactctgtgttgaggacccgcaaacacggttgtattatccgtggctcctatctctttcccaaatactaccttgaaataagcgagattgatttcccactatcactgacgctgtacggggtacggggtacaagtgtgcatgagagtctgagcgcctgccgtcataatagtctgagcgcttgcaatgctgtggatagctgcagatgctgaatatcacttcctaaagtagagaggtaatcggcgttttgtctgtaatgattggcctgcgcaacaacgatatagttgcgatggaggcttatgatgtagtgaggggtgaattaactttggtggcaacagagtggaggtggtctacggtgtagtacatccggtagccgaattaggccgtatatcaaattaaccttggaaccattattatttattacgtatgtaaattacagacccgccaaccagaccctggcacttttacttcaactaccgtttactattttggaccctcttatgatttcctattttaaccacacgctcacctatatagctgcagggcttgatgggcttcatttgttgttgaggtgcaaatggtaggttatttaggaatgaagagtgcttctgtttagagtatcatgctagcctgtcacttgctgccacttagattccaggacgatggatggacggataagaagcctgacaggattaggaacttccccccagtggaagatgtggtatcaatgcgcttctgtaaggcctcggaatacgcttgcatagcttagacttccagtctcactgacggagttgacttcagcaaaccatctttgcggatatgacagcgttattgaacgtacgtagatgcatctcataggtgatcatattgcctaaacaacattgggcactctagttatattgctgctttcttcggagaatgatacagcgagaagaacttgtctttgcttctccgtgcaataagtagattccaccgtgcactggagtcatcgctgtttgatatgtcttcccttgtagcaaagaaatgttccaaaaatacatagtatcctcagacaatgcatttaaagagctagcctgagcagatatttcatgattgaattaatcagtagttcaatacccaggcgacacacctccattgagcatcatctgggcgcagtcctggtgctcaagtccatccaccgggtaagagtgaggcttgcatgattttcatccagggttcgtatctccaacttccaagagattacatttatcacaactcccttggtcggcttgtttcggtatgcttgtgctagagcaataacactcaatttgagaggtgaagatgtcgataaagcccaggtcactaatcatgggcccattttcgcggtacgtgttactacggctctttcatgcgttcacaagcacaggcccggagacatggagcaaattcgagcttcagcagaatattgtcatcataacatctttcgggggatctttttctgatgttttgttgacgagggattgtaaccagggcggggctcaggatcagattcgaccagctcctatctccgtatagagcaatgactgaacggggattccgaaaccggtccttagtaaaaccctctcatcacaagctgaagattgaacgaaatggaaaggtagaggtctttgaaggtaccgatatttcagattagtagagtgacttggtagcttagtgcttttccacaaataaagtcggaggcagatgaagcagagatggtattgcggtaggtcgtaagaaagccgaaatagcagcttgatatctgcgtcatttccggtgcggccgttcgagaagttccaaaaatcaatcctagcaaaaggaatacagcagatgatgattgcctaatatcagacaagcaaggtcgactggtgataagtgctcagagatcatctataatagctagaaggtcggtcaaggctggtggctttcgcgtggccatcctgttgcgaaaggtatcccctgtgcccctggctgacttttgcttcacttgttatctgacgtgtcagactgaacggcttagtcgtaggcagcttccatggcctttgaagtatcatccgaatttcttgaccttgtaatccggatagttagttaactaattcccaagcgagctgcgcagcgcagaacacatagtaaaatcggtaaattataatgtggtattttaacaaccaacgcttttgtttaatttcattactgtccgatagcaattgataagcattgggctagaaggaaaagctcatatagataaccgttgttgagatatcatgttgtaatctatcgcttttactatgtgttctgcgctgcgcagctcgcttgggtgcgcagctcgcttgggaattacgttagttacattgggtgattgcttactaactggaagtacgatccatttgagtaatcacacctcggacctcgggagcaggaccctaagcggcggcaccccgatcgggaaactgacatccgtggtcaattgctatagatatccaaaattcatggctatagatttcacaattctagcattttaaactacttctacttggactcttgaggcacactttgatacacagcacaagccatatgatgtcataatgcgtcagttcctcagaagtggggctgaaataaattatttccactttcaatttttgtctgcgcgggtcgtcccgctacgtgaccgcgtcgggtctagggtggttctggttacataccgcacatttcccgggtattttgaaatacgtaacgtctgtatctgtttacactagtattttttagaatacaattatacaacgttggagtttgccactctgctctgactgatgggatatctcccggctgggactctgattggaacctatgcttatactagcgggtagtagcgggtgtttaacagtatagacgttgcacttaatctgaatgtcatctttctcatagtcaaccttgacattatatgtgataatcatgccctatgtcgtgtcaccattgcccctgacttgatctgccctgacaatatagcatcgatcgtccttggcactggtatagggctgttctcggtcaaaatagaaccccattgtagatttacgaataatcgacaactttcgaggctcaagtgatatcccacttcggtacttgaccttctcgcagtgtctgacctaaatctaggttgtcatgccaatgataatcgttacttcaaagatattaaaagccaatatccctgcaatgttttactacattgtcctctatttaaacttaattcgggatctctatggccataataaccacaataaaaagcagagctatacctgtttacctttgcagttctgttaaggtggcacatcgaccattgtctgtgaaacaccaacctcttgatagaaatagttctgttcttccgagagtagtagagggctggttttgagttgatccccggatatcaggtcttttactacagtctacggcatgaccctgctgaatgaaaccccccgatgttaagtaaacggcctttgtttgcatccaatttagtatatgaactaaattcagactgtctcacttaggttgtacaccgatggttgccggtacacctagtttaaggttctattcgagtcacacatggaggtgtagtgtccaaattatatcccaggagtggtgccttccagggttgtcaagtagctcactatagccgtaaacggcagtcgtgacttccttgtatgtttgccctaaatatggacagcacgtgttccccccgttccttcctgaacagctggggactttgtttactatttcttcctccagtttcctctttcttttctcctctgttctctcctcttccactttacgttcgttccccttgttcctcaattgaccctcgattgcttggttgttccatcaagtgatcacttcacattcgtttatcaacctccatattcgccaagatggtagcttggatgcgtttcaagttgcttctggctatggtcaccgctctggtgactatggctgctgcttcggctggtaattatcatggctgataattactctatgatcacttactgaccttgttgcaacagaatgccaatacatcgagacggtctttcttcaggacccccacactggggagcagtatcagtttggtgaaggcaagtcaaacctgctatctgggcttgcctagaaatatgccgttactgatcgattttcacagtcaacgttctgcctcgggccttgtttggtcgtgctattcaagcttctgaactgagtaaatccaggctcttgccatcctcgcctcttttctagaccaaaaactaacttggtactagtcactgtcacggttacccataccacctgcgatcctgatgaatcgaccacaactgtcaccacagatgttccttgtacgactgtccagtctaccacacttctcaccacggagattactccagtccccgctcaaagtacccctgctcctggtgttcctcagtctactgtgcctaccacctcgtcaactccggtgcctgttaacactcagacttccgtgcctattgtccctagcgctacaagggtgaccaccaagtcttctgcacctggcaccactttggtgacctcgcagtcttcattacccgggaccgctcagaccccagtgcccagtactaccaaggtgcccattggaagcagccctgtaacaaaccctggatcctccacggttactgccactaccactgagtcggtttcttcttccagtcctaatgctaccagcttggctcctatccctgtcactaccgagatccctggaactactgggtccattacatccactcgtcctaccaatgtggttcctatccctggtactactggaattgcttacacaaactcaactgttcctcaggctcccaggacggtgactgatgtgaccaccttttacactacgtcttcttgcctcaactcaactgagctggcccctgctccggtgaccactgaaatcaccattaccgttgaagttccttgcaccgagaccaccaagtgtgtcagcaccaaggtccttaccaccggcaccctgccggccttgaacacaaccgttcctgcttccatcccacggaccactacgaccaccgagattcagtcgaccatttctgtccctgtcccgattaccactgaggaggtcactggcacggtcgagatcccttgtaccgggaccaccaaatgcaccagtactaaggtgtacaccaccatccctacggagactaccactatctctgtgactccagtcccgattacagctccacagcccaccactgaggtggtgactatggtccagccgactgttcctggtgcccctgcaaaggagaccaccgaggttgtgactactgtgattcagcccactgctcctgctcccgtttcgcagggcaccaccgagcttgtgaccactgtgaaccagccctctgttcctgctcctgttccccagacttctactcacgaggtgactaccgagatcaagccgactgacttggtcccacttccgcacgccaccactgtcgaggctacttctctggtcaaggttcctgctccttctacgcagccggctaccacccaagagaccaccgaaaatcaaccagtcgctgcggccccgaccactctagctacttctactgtctctaagcctgaggttgagagtaccacaaccgagtccaagatttcggttgtgtctccccaacagcctactcacacccaggaggatactgtcctcccatctcctcatggcacttcttccagtggtactcactccgcttcccctgttttcaacggtgccaatgccgctgcaatcatggacagccgtgtctttgccatgagcattgtgattatgctctctcacatctttcgcttgattctgtgagaacgacatacactcttaccgtgtgacgaggcaagtccagccatcttctgatgtagcaaggatagtatctgatgcgatgactgtgttcgtgatggaatttgaggaacccatggtgttgatgggtggtcgtgtgtttttatgggatgcaactggctccccttaatcttgcaaattttatcagtcactcatattctagttgaagcatagctttcctaatctcacaaatgttcaccatggttgtgtctaatgataaagaaagtatcctgtagtctgtaatctgcaaccgaatggcaactccaagggacaacatagctgaccgaacagtattcgggcagttatatttcggctgtgaaataatcacaatgtacagaacgtaatacgtatgctgtgagcatcaaagcattgaacataacacatctttatcaataaacaacggccagtgtgataacctcacagaatggatgaatgcctaatatccccaaatggggatagtagcttggctaaagccagggtatctcagagaaacaaggagaatgcataggtatgtgcacatggagtatacacacaggacagacgtgaatgggtacagatgtccctaccccagtagagttcaaacctcaacctcaccaccaagagattcaatgtctcgcgtcagagcacaaatccgacatccatcgccaatcttgtcccgcaggattcttgccgtcgtgaccttggggccaacactgcgagatgcagtggcagaccgggtctcgtcgactggagacatggcccggggtgtaagatcagcagatcggtcacggctgtttgcgccggattgttgtggcgtgtctgagtgcaagtgggatagatggaaaatgtggccacaagcaaagccaacgagaatttctcgctctgtatgggggttcttatcagcattgtctttttggatgaaaggagttggggtcaaaatcataccgttttcccggaaggcggctttgcagcnnnnnnnnnnnnnnnnnnnnnnnnnnnnnnnnnnnnnnnnnnnnnnnnnnnnnnnnnnnnnnnnnnnnnnnnnnnnnnnnnnnnnnnnnnnnnnnnnnnnnnnnnnnnnnnnnnnnnnnnnnnnnnnnnnnnnnnnnnnnnnnnnnnnnnnnnnnnnnnnnnnnnnnnccgggagggggtttttgcgcccgccacatcttccctgtccagggcctccgaattttctcgcaccattggtttcagatatatgatcttgagctggggcattcattgtcgttgccttcttggaatcttcctcgccaacctcggtgacatcaaacttgattccccgccgctgacctttgcgcagcgagtccatcccaagtgcaacttcgctttgcataaccctagccgcgccttgactgatactagcctgcagatcatgctcacggatcaagcgggtgaggccctctcttagaccttcaatctctagcccgctcgggatacgacgcacaagctttatcgggtcgatggccgtcccggcctcaacgagaagaccatggatgaactttggcttgtccatggagtagtcaagcagatcctcccacagatcaggatcgtcctgtgattttgcaaatgaaatggcctgtgaaacatccttgagatccgatagaatcaggttcaaggctcgctttgtctggcccatcttggacaagagaaaaatcaactctggcgtgaatctgtggttttcgcagatcgatgtggctttctcgaacgaataggatatgcttgtttggaggaactccatcagtagaggtcggtcgtagtcggcaaatacctcaacagccgtatcagcaaagttatcaatcagggctttgccttcatcagcagcaagcttgctggctgcatcccgagcatgcgttccacgtcctcttctgggtttatgagcgtcctgcggtaatgattcacctcgccagagcgcacggagatagaaataaaggaacaggaaccggtccgcggcgaccaactgtgataccacggtatctggaggaacaatgcccgtgtatgcttcccttacgaggagtcgcgtgggctcagaagtcagctcctccagttcgaattttgtggcggacttcatttgctctttggaaacgcgaatcatgatgaaggccggtatatcatcagagactgcgtcgagcaatcggtgttcccgaaccaaagacatcgcagcatctccatcttgcaatcgaatgtagcaacgcaaggcttcgcggtaatgccctcctgctaggaacaacttggcgaggcaatctgtgaggattcgccattcctcagaaccggcgcgtaccgatccggatttcagctgtgcttcgatggattccgtgatcacattcgcatcaaacaaatcggatggccatgttccgaccagttctttgaatttgaccaaatctcgtgacacgtagtgagtgagaatgacttcgtagatctgacaagacaacgatggatgtaaatcgactggaatttttggagttatctcatcaattttatcctttttgataaagacccacgcccagtgttcccattgtgaggcattgcgaatgactttgccacaaatactcgcagcatgaatccacttctcttcgctgacaagttggttgatccagagttccccaaggcgagctttttcttgttcggcagccgaaacttttcttctaccagcggtcgtcatggatgatcgatcatcagcgaagaagtcacctaaactagtttgcgaccttgcagcctcggacataacgtcggctaagtcaggtattgagcctgcagcttcgggatgttcatcgacgagacgccatgcgtcctcgtactggccatgagaatcaagccaggacaaacggtccgcaagatcccgttttactgcaacaacacagtcatatgggctgtggacaaagattttggcaccaggagcacctgaaacttcctgtacctccttcggaaggggctcctcagtcgcgtagattttggacatgaaagagggagcaaatctaccagatcccttgtccccactacttgtggtactgcggatactggcgccggagctgaaaagccgcgcagagtacatagtagcatccaaaatcccatgcccaagagccccgagggcaccgcgctggacgacctgtccctctggggtcttccacggaggcaagacacttagatgataatcagatgccgagagaccctcaaagcggtttactgaaagcgtatcagcgctaatttcttccttggtctcaatgtcaatgacacgaagttcaggttccaggcccttttttcgattgcgggtcccactgcctcctccattacttgcagtttcgccttcggtctccaaatatgcaagaatgacaagaagacgaggcgtatacaatgagatgccagataccacgcagtctgttcgtaatctgtgttcaaagttagcgatgaacgatacaatctgtgagagttccagctcacattgtaacaacctctgcagagcccaatttctctcccttggatgttttgcttgccctttcggggtagacatcaatgacccaaacagttcctccccacccgacgacaagcttttccactttctcagtgggcaccgtcgactgtacctctggacttgctggacagtcatttggatcgagatggtcccgaatgtccagagcggactggtcgatccattcagcacgtgccttccaaacattggccatttcgtcccagccgggacgatttggacgatcaatatggctgattcgtttccaggcaaattctgtctctgaagaatctagatgtaaatttgaccgcataatcttaatgccttcctcgttgacccaggccacgtaatttcctgacaatgaccatttaattgtgcttatagtcccttcgccgctgtggataatcgtgtcttttccactagtggctgctaggcccatggatccaagccaacttgacgccgttgcggctgcaccccccattgttgtagaattggaggtcgccccaatacgaccaccagttgtcaagaccaattcacctgctcggccaccagacaggaatgcccggtcattcttgtattcgggagacaaagcaatagactggactgggcggccaaaattacgcaatagcacatccttcgggtctactagcgatgagacgcacacgtggccatcgattgaggaggtcccgatgtaaatcgagttcgatggtagagggaggacggtcgaatgattacccagttttccttggccacggatactgccagtgaatgttgatgctcgcgttggtggtctgtattcttctgcagtctgcttgctgaagagctcttgcttgaagttcggaaggggaggcggacatggcgatatcgatattgaggtgacactggctgagtgtgcatgatatacacggacggattgtagaagcggtaaggacataacatgcttgacaaggtcagctcatatgtctgcgcgctggtgtggctaacttacgacgtttccgttgtgcgtcccgacgatctaggtacctcgttagctcattatagtataggtcccgctaaggatgcataccattttatcccctgctacgaggaacgagcttgtcgcatccccgttgcgatatactgatcccaggtgcttcgtaaggtatgcgtacttgaggcggggttcctcgtcctcgtcgtccgagtcatcctctccttcggcctcttcttcctcggcctcctcttcttctccatcatcgctgctgctagagctgtggtcattgaatcgttgctgtctatcttgggcgccttgagtcgtgtctgtaggtgatccggttcgtatggatgtgtcgtgcttgggagtgctctgaatggcactttcgtccggcggtgtcgcgccaggcgcgtccatggcaaatccctctcacacctgcagctcccaagctggttgaagtggaatgcgacaagctgaaacgggatcctgtggttctacagttgagccggggtaggtcagtgccccgagcttgattccatgactaagcgggctattgggccgcgggcttcaggacgatgtcatcgaccgagctattcgggctttttgatcctcggatacacacacacatacaatgtttgccaggccatatgtatgtttaaactgttgcaggcgcccaatttcacagtttcctacgcgaccgcagacccaattccttcatgcctctcctagactagcacttccccgacggaaggatttcttttcatccaatgcccacttgaaacaaaaacagaacgccgatgaaccaattgaatcctctccggattcccggaagcaacttcgacggggtcctaggtcaccagcagctcccacttcattgcggcgggtagcggtagaggcacagaggtcgaaggatggcattatctccaaggcgctcctcaaagagcaggggttatatcggactaaggtaggcatgactgtttcttctacgatcttcttccactaattatttatcgctagacagttaccgcctacgccgtcgccgaacaatttgacatccgcaaagtaagagatatcttgcaagaacgaggatatgaaccggacccgttggaaaccgggcttttcccgcaggtcgttcatgttcagatacccttagactccatacagcgcatgacgaatccctccggcatagatctaccatccgacgaagtgggcgatttattcgtgtttccctccggtactgtggtagcgtgggggctcccagaaggattcacatcattcctggcaacgcggactctcttgcccgcagcacaaggtgcccatgtggataacctggaaaccgaggatctcgaattcgtggaggacccgaagcgagagaacagtgtgatcaaaggtgacacgattatactaggcaccaaaccaggtcacggagatgcggagggattaccagcggcgcaacaatccattaacacggtgttgaccaagattgcattttcgtcaggtctcgctcggagtacgaagttggccgtcctcgagagccttctttcaaactattttgaatcgactcggccaattccgactcttctatcaaagggatcccgtcttccttttacacgagactttgtcctccggaagacggggcagctgctcagtgtccgagcccagctcaatctctattccgagctcactgattcccttcccgatctcttttgggacagccgacacgagctcggcttggagggatactacgagcaggctggcagagctttagatgttggaattcgcatcaaactgctgaacgagaagatggactatgcgcaagagatcgcaagtgtacttcgggagcgcctaagtgagacacacggtctgcggctcgaatggattattattctgctcattaccgttgaggttggctttgaagtattacgactgtggaaagaaagagcacataaacaggaggaggcgcgcaagcaggaggcctaggtcacccgaggccagaattgacaggcgcgaactcagtgtgattatattgcccgcgataccccttcattttcaatattagacgagtgcaacataagagaaaatgctgctgtcggcaagtaatcaaagccaggtgactcgtgggccgattccccttatcagcccggctgtccccgcgcttagtcatatgagactccgcacgaggacagtacccgtagacgccgacaaccattgtagcctccttaacatacctatccctcgtctaaatacgattttcctagtacacacctacttgtctattcttatattcttcctctgtttcaattcgacacgtttgttccctgaaataacggcaaaatgataccagcgatgatgcggggatcatcacaacagctcatggggattcccggaccccagaagattctcaagaccgtcggctcactctggctttcgcaaactacaaatgagaatgataatctcagaacttcatcatcatgccctctctcggaaattagttgccaggccaatttccacggtcaagacacctgctgtttcaattaccccggtggtcaaatgctgcagacgcaattctgggatgtcgatcctccactcggtcctgaagacgcatggactatccatggactatggtgagtctatatcatatccccaggttgaatgatatcaagctaactcttcaggcccgatcactgcaacggcggctttgaccaattctgcgactccaaacgcaagtacagcaacatttctctgattatagtggacgcgggccggggagacttgcttgaatacatgagcgagtattggaaggatttccggggggatgataacaatctgtggcaacatgagtggaacaagcacggcacttgcgtcagcaccctggaaccagattgctacgaggactatctgcctcaacaggatgtcgtggactacttcgacaagactgttgaggtttataaggagttgccttcctatgaggttagtttaatcctgtcggttaatgaccgactatattcggatcaaaccactaaccatgcgtaagttcctggccaatgctggcatcataccatctcaaacacagacctatgctcttgccgatattgaagctgcactagaacaagcccatggagacccggtcactatccgttgccgaaatggtgccatcaatgagatttggtactatttcaatattgcaggaagtctccaatcaggggaattcatccctgctggaccaggtcggtcaaacttcaaactcgcgttggtaaatcgcaagcttacaaaatagtcagatggccagaagtccaattgcccttccaggggaatcaagtacccactgaagcatgctcggccggagccgacccggacgacgaccataggtaatccagagcccacggcgccaggaactccatttgcaggccgaggtaacttgattgttgagaggcttaaccgaaagcatggctgtatcattagcttcggaacttggttttcttcagggacctgtgcgactttccgggccgaaaagctatcaggttcgtgaccgtgctttccacacatgacgcctctgctattgtttgctaacgtgaagtatccttcaggtgatttatttactctgaattctagcaaggggccctgtgccttcgagcgagacgcccttacttgcggaccacacgtcaacaagcccagtgagttcaccgtatgttcatcccagaaaatgctccaatatatcatctcatcttctcacactgcatacaggccaaggatggtaaactcgcctacagtgatcacactactttctatgcccaaaatcctcccaaggggcgtacacaaagtaatgtgtatgcttcgcaagggggacgacccattgaaattgagattacctgggtctcgaagtagatgggttatctttactgttgtttcactcgctaccctggtgaaacataggtcggcctttcggtgtgatgttgcacagaaatccctgcatagaatggaacgaggggactgttagacgattcctcaacgcagaataattagaaatatcaaatagaaagcgcggtgtttggagtagtatgttaatatatgtcattccttgcgtgaacggatattttgtattccgaaacttgagggtgcaatcggttgattgagggaaggtcgctaagatgcagactatttgtacttttctcttggaatctattatattccagtcttcttttcacctacaattctacgatcaaggctgtgacgggttatgtggagccagatgtaagctgtaggcatagcatgtttgagatggtagagtacaagccatccgcaattatgtctgtcatcgaaggaaaacagtccttgaacaagccatccttgacagggtaggtacagaagagattcattgaaaataaagacatcaaatacatatcgcatcatgaagtgagtgaacatatgaaaagaaggataaacacctggaataaacacgctgccgtgtatcgaacatcttcgaagagatgagataaggccgaaagaacgtgaataaaaacaatcatgacaagacaaaaagaaaaaaaaaaaaaaaacagcaacaagaagagacaaatacatggggggaaataaggggcaaaaagcaaatagcccgaaacactcgcaagtccgcaaagtcgtttcaagtcccgaaatgtgtgcagagaaagaaaacgcccttttttatcgtgggtcattaaagtgtacaaggtcgtcccggatcgtcgcaaagcagtgtcgccgtgaagaagatggtaagccacgccgtatgtgtcgtcgctctttttgtagtaacatagccgctcaagggtccactaggaactcgctggacaagcagtcgattgggtccgtcaggtcatcaataccagagaaggtcttctcgggataatatgacgagacaggggcgaagtcggttgcatcgacgaattgataagtcgggaaaccagggatgcccgagtgagcgagatgaccgaactcctgtcgcaagtcctcggagggatcttgggtcatgaagatatcgatctccgagctgacggatgattcggccagagtgggcgccgaccgaggggaagacatctcccgaggcgagagggcagattcactatagagagattcctgcgagtacgtggattcctgcgagtatgtctgcgagctgaaattcgatgcgtactgagccattgcctgttcgtatctagcgtgggcgagttgaggtggtgacaagggcagcatgtcatcctcgagccgggcattcacggggttgtaggtgtggcatggcggggacattgtgtggtatctgtctccgggagaggtgggcggcgtataggatgagacggcactggatggggcatagttgggcgagttgaacacgggagcatcttgcagagtggcatgggtctgggctgaaccgtttgaggtggatttttcagcaacacgttgacgagtacgagtggacttggcctggcgagtatcgagatccggacggctgttcttcttcttcggggggcgaccgcgcttggtggtctttggaactacaccggtgaagcctccaacacacatatcgcgctggcggtgccgagttagggcatcctgtcgagcaaagctggcgccacaggcacaggcgaagggcttattgccactgtgtgtcttgagatggcgcttgagatcgtgtccgcgcacaaagtgcttttcgcaaatgtcgcatttgaattgacggtctccgaggtgtgtttggacgtgggacttgatgttttccttgcgaccaaagcggcaaaggcagcctgtaaatagacagacccactttccatctttggggtcggggccggagatgaacttggcaatctcgtcagtcgaaacgccggtttcctggactgaggccttgactcgggcgtcaaggtcatcatcgtgagcggctagctcgatgggagacgacacagtagacggggcacgttttttggttctgccagtggaagatgtgattgagatattggaattttgaggcgtcattccatatgaactcggggatggcatatcggcaatttcggcgaacgtgctaatcggggaattgaccggagagggcatttgctgcttaatctgcacagaattgacataggctccttgaaaagactgcgctctctgcatctcagcagtagcggggttatgggggaatgagaaactttgggacttggaaggtgttgggacattgctgtacatggaataatcaatagatcttttcaatggggtagaatcgggggtcaagggggagtctggcatataatcagtttcggtcgggtcaaattcaacataaagattcatacaagcagtagacatttgcgaaagaattttcgcagatggagcctttggttgaacagagactgggtgcattggtccggcataggccgtcacctgctcgttttggatgattggcatgttgcgccgagagtacaattcccaatcggcattgccgacatattgttgctgttgttggttcgagaattgctcttgttgcatacggtgcagcgcacgcttcaatggtgtattttcggagctctcactggctgatcgggacaaggccggagcaccgatggacgagggcgcagggctgccagtggtggtgtggatcgcttgcaattgttcttggttgaaagcctggcagtcagacccgagcgactgttgttgatattgatatggctgctgcatgtgcatgccatgtgggatgaaagcctgctcgggctgctgggcataggattgatactgctgtacatccctcggttgatatgagaaacctgatttttcgttaaaataatctcgcaactgcgagaccgtcttcggcatgtgtcggtcgacattgggctgttgactgaaggagttgtagtccacagtctggcctcgacgatgtgaccgatggggttgcatattggtcatgactggttggtatggagcaactggggtggagatttgacggcggtgacgaccggttcccagcgcgttggagttcatgattatattgccgcttgacggttgggtcctgattgaggtgtcagtatgtgaatatgaacgcaatgggcactaggaagagggaaagtgggaggggtgttagaggctcaagagtatcaagtgtagagtcaacctattcaggtcacacggttcaagtagatattctcaattgaacctggaagagcagaaacacgaatgtatgaaggtttccaaggtttggttctggaaccccgatctatgtgagagacccgcggttctcatcaacaaattggggcgttggcatggcaacggcggtgtccgggcgtctgggaaaccaaaggctttgacgaaagtgggccaacccttgcccgacttcgattttcccgtggtgatcgaggaccttgcttgtgattattcgacttcttctgcaagggcagctagtccctgtgatagaatgcgtataaacgtacctagaatccgtaagattgacacctcctcggttcgtttccaaggagattcgatataaacaaggtgatctcgtactatatagaccttggctccatatatagtacccatagcccgatgggccgatatggtgccatggcgtcatccatggaaatgatattcgacctgtccaacacgggataattattaacgtagcgggcctcaggcagaaataatattcgagtcacgtgctttttctcggtcagcatttcatttcacgctagactactttcggtgcacgacccaccccacgtgatcgcacaacgattttaatcaccaaccggcttccgcgcacaacgatcttctttaatcttgcaaggttgaggaagacaccactgtcgaggtgagtatttggttttaggccagcggatacgaatgtgatgaccatgcgccattagcatgtagtccattctctctctgacttctacattttcgtcgtcgcgagcatcgcactgactttttttttttcgcaggccttcatcaagatgcagatcttcgtcaagaccctcacgggtaagactatcacccttgaggtggagtcatccgacaccattgacaatgtcaagtccaagatccagggtaagcatcgaaatccgcgcgcaacgatcgcacacaccacaacccgaggctctagactaaccccgcaccagacaaggagggtattccccctgaccaacaacgtttgatcttcgctggtaagcagctcgaggacggccgcactctttcggattacaacatccagaaggagtcgacccttcacctcgtgctccgcctgcgtggtggtggtaagaagcgcaagaagaaggtctacaccacccccaagaagatcaagcacaagcacaagaagaccaagctcgccatcctcaagtactacaaggttgacggtgatggaaagattgagcgtcttcgccgcgagtgccccgctcccgaggtatgtgatagctctgtcgcaaaacgattacccttatattctgattcggaaactaatttgtcctttcttatagtgtggtgccggtgtcttcatggccgctatgcacaaccgccagtactgtggtaagtgccacctcacctacgtcttcgacgaggccaaataaacggtctaagtcggaccgtggtgtgctgtcaccgagcttgggcgtggtttctgctaggctagggcaagtgacggagtgtcgcggttgacgctggttgatgatggttcttggaataccaatgtgctacagtcaattacaaacaaaaactaggcatccgccgaaaacttaaaaattccacgtaatgataagacttgtatgtattcgtagacttgggatattgtcatatcctgtccgatcaaccactatactgcgaacaacaatgcttaaatccgtgtaagccctcactcaacctactcttccgggaacccagcttggacattggcatacttgctctcggggaaatcaagagcattacacgactgatccaaagcgcctggaccacccacaccgtcaacaaagataccgatcaaacttccttgcgccggatcagcctccttcccacccttatcaccgctactctcccaccacataccaccacccagtccgcgctcgcgaatatagttcgccttgatctgcgccatatagggtgtgtcgtaagtaaccatcttgcgcgcaccggcatcatagcagaacgaggcaccaggttcctgatcaaactgctcctgagccccgggtctgggcagtgccttgtaatcccacaccccgttctcccagctgccctctccgacgccggagaagggggcgccgggtccgtcagtgttctcaaatgcacgtccgtacagcggcatgcccatgacgatgtttgagggtggtacgccgccgacgttgatgtagtagtctagggcagtgttgatggagaacggcgtggatgcagggttggaaactgaaggaacgatgttcgcttggtggccagcgttgctgtcccagcttccggcgaagtcgtatgccatgaggttgtagaagtctagcactggggtcatgtcttggaatctgagcttctcgtaattgctcgggcctgtagtagttagtttgatggttcagggcgcttttctatcgccgaggatatggtatagacataccggcagggcaggcgattgacaagtagaaacggcgatcgggaccggcctctctatcaagaacctatttccggtcagttgggccaatttctaagaaccagaataacgatatacctctcggcacttccgaagcagaagaactaggtgctcagcctcggtatcatctagatataaaataagcctcgtgcctccttcgagtatgttccgacaaacccacctttaggatattcccaatcaatatcaagacctaagaaacagtcaaaaccagcatttcacaccatactagtcgatgaaacataccatcgaatcccagatccagaaccaagcgtgtcgccgattcggcaaatgcagtccgaccctcatgggaactcgcaggctgcgcgaaattcgaggagtacgtccagcccccgatagaaagcaaaaccttcagcttgcggttctgcttcttgagcaggaaaagctgcttaacacatccgtacacattagtaccgacgtcattccacgagtctgtcgggtaatgcttctcgacgtcggaccaagagtcggtcaagtacctgcaattctgggtcagaaaatcttctgcagtctgtacggatcaaaatcaggacttacacttcgccactttcgggacggatgttggcaaatgcgtagaggatgtgtgtcagcttctccgcgggtagatcctgcgggttgtagttgcggccgtaaattgcctatgcagtatgtcaacattggagttcttttctgggttgtatatgcagccagttaggcatagtaaaatagatgcagaccatgcagtcggagttgaaatggtgaggccaagttaagtatagtacatacccagttgacaaaataggcgactgatctcatttcacacatggctgatgcgggatgggtagtacggggattaaagtattgcacgagaacagccacaagtagggcagtaaacagagcaatagacttgagatggtacgccacactttcaagtcaaaagaaagttaagagagtttcgggagcactaaaagcaagtatttcaagatacttcagttatgtcgcagcctaattgttagtggacttgtcgtatccttaaatctgggcagtgtcaacgccacaccctcattggtcaggactcactgggcacctgtggcggtgtatatattcaggcaccaaggcgacaaacgtggctgggtatagaagagataagaagatcgaagatcagtgagtatctgtatatctgtataagctggggaggacctatgtcggaggttatatacatatgtataggtactaaatgctcagaagggtccaagaaacgtggtgtgtgacacctccgcctgttcatcgtgcaatgtaaccatacttggccaatcctaatatgtctcatgtaatagtgtgttagcttattagatttggacctgcaactcattgtttagaagcacgaggtaggaagtatgaagtactcgtgatgttaagaatgcaactctccactctccagaatgcgacatggccatcagaaaagaagcaatactatgtagaatcaccattgactagtcatgaggactcgtttactagattcgtggttaagaagatcctgaatattctgaagttcgaagatctcctgattggaagtatctgtataaaaccctggtcaggcgacttacctcgaatatgcccacagcatcggattctttcggcagcagatcaactaacccttagtgagaggcttcccaagccgaggaatgtcggacaagcggcaatcccggatagtgatctcgacaggagatgtacaatgatcgactgaaactacacgtggagtcagccttgaacccacctgtctacatgtgatgaatgtatgtacaatacatatgttgcaagttaaaactgcatgaaacgcaagttctatatccacaaatataatattagatataactagcactcggaggcaccgaagttgatgtgcaacgatcgacaaagcatcttcatccaaccccaccgggcctgggagccataattgaatgccgatcaagacaaacaagagccgaagatacgaggctgtcccgggaagcgggggggggggacatctagaaagagaaatgtgattggcccgcccatnnnnnnnnnnnnnnnnnnnnnnnnnnnnnnnnnnnnnnnnnnnnnnnnnnnnnnnnnnnnnnnnnnnnnnnnnnnnnnnnnnnnnnnnnnnnnnnnnnnnnnnnnnnnnnnnnnnnnnnnnnagtaaggaagtggggggggggggggggggggggggacatctagaaagagaaatgtgattggcccgaccatagaaagttaacccaaaggaaaccccgggaataacaaagaaaagaagaaaagaagaaaacagaaaaaaaaaacaacggctgcaaatccaatccatccatagctgaactcgagccgcgatatggccgtttgtagagctgattggatcgacacaagccgaactaacgcccttagcctcgcaagccgtgtcggaaatctctacatcgtatgccaagttgatcccgatccactttgatcgtaacgcttttcttttaccctagatatacggtggatcgatttcagctggtatctctgcctcggagccccaggtgtctcgttcaaaataagcctctacgatgtgtcctttgtccttgcattagtacggagtatgtacctgaaagcaaattcgtctttgcatcagaccatgtggggcattggggcattggggcattagggctatcttctgttatgcacttcattcaagtatgtataacatccggagcagagtacttgtccatagtactacgtagtattacgatgtatgttgtccaatatacacataattagatctggtcttgtagattgaacaataaaatggaatggaatgaaattggattggattgagtcttcaaacagatctcatatcgcaaacagaaatacagcccaaaaaaaaaacaagaaggatatcgtagctataaccaaaaccacgcaagtaatccaaactcattttgttatttcacagaaaggcagtacacacggccagcgctatacccaccatcccacacaaacccctctattaaaagaatcatataacgcccaacaaggctcacaagcactcaaaaaaaaagtacaaggcaaaaaatccgaaaaaaaaaaaagaaatcccgcaacctcaacccccacgcaacatgcatttgttcctatttccaattttcatttccgtttcattactttacctacccgcaacccaacgatggatcacctccaaggacgggtcatcgtcaagccagtgaccagcgcgcagatccgcagctcgcaagtccgccacgacatgctggtctgtgaagcgcgccagatcctgatggagggcggcagttgcgctcttcaatgctgcagagtgctgggctgttggaggggagccgcgtagaacaccggcgcgcgtcatggcccatcgccgggctgcggcggcgcgcaggtagatcttatgtgcttggaatcggcgtgcgctgctgtccagtatgactctgaaggatgatgttagcgtcttcacataattggatgttcaggttttgctgtatacctttgtagctcggctttctcggtctccgcgttcccttgccctgtcaccgggcagggttggtagttggcggacattagggtctgggctgaggctagggactcgcggagtactacgaagccatcttcccagtattcctcttgggatacttcgacctgctgttgcgagatgtggagcaggagagtgcggtagtcgttgattatctcggcgactcgcatagcgcgggcttgattgactgtgcgggtattagcaggttgtggttgtttgattggttggttagggtaagcttacatccatctgccatgttttcggtagattaagtatataaaaggaaggcaatggatcgacgagtagcaatgatgcaaaaagctagtataaagaacgggctgcaaagataaccaatgagagatgaaagaaaggcaatggtcagaggaattgatggcccacgaagtcgagaatgttaggccaccaacggtttccgggggggaaaagaaggagagatataagtcttcaaagattggaaacagtgtctctcgttaccccatacatgatcaatgggtggaccaaaaagggaaaaaagccatgctataaaataataataacataaaaccaagggatttctcagcctacagcggagccgacgtcaggatacatcacgaagagaacgagctgcaccaatagacgcgcaagatcccacgatcaggtagttcgggttgtcaagcacagctgggatgggacggggccacaccataagctcccgaaaaaccgtttacggcatgacaagggccatcctgatcccaaggagagggatcggtggagaaagagagaccagaagagaccaaaagaggcatcgcatattaaaaaaaaattggcctatggaattcccagtatcccagctgtggattgggagtggatagcgttggcccgcatatgagattaggttcttgcgccgatttggcgtttctggtgcgaatagagagatggtgtttcatgctgctgattggagaatattgaatgaactactgactcagtggggagtcatgtttttttttttgttttttttgtccttttttcgtgtcgatgcatcattcccaattcctcgtgggaccctctgtcgaaattccgaaatagaaagagttcaaggtaaaagggacaagacctcagccttggacctgcattagacatttcctcggacctgaactcggacttgacgtgtagtggatctgacaagtggtgaacatgttcagctggtatattggcggagtatttgccacacgtgtagtccaatcagatgacgagaacagcctccttggataatttatcagtaagccacattgtggcgcccacaactcctagtagctgtctactgtctccttgctgttaggtaggtaacactgtgataacctggtagcgaagcaagcccaaagtttgcactggtggattctctaccttggacaagctggacaagctggatatgatctcgggccatccgaaaggggtatcgccgagagatgagattcagtatagcatcaaggtatcgtgcaggaaaataattgagttatcattcacagatcgtctgtttctctaaaataaacaccggagtccttccattactggtctcttgcctccatagcttggacccagctcactcagtccttctcggctatggcttgcagccgttcatcaatctcctcttccgtcagagcacggaacgctgtagtggtcccctcctcgccgtcggcccgcggcccaccgacgacaccaatctcgatctcgtgcttcttgaagtcgacacttagcacattgctgagggctgtaatgcccagctccacaacctcctcccagctacccggggctgcatctttgttcttcagcttcttctctaggtagttcaacgcctcctgctgcttgggaccggatgctgttgccttgtacccaacatagtaaccggccgggtcacatttgtagagctgcgggccgctctcgtcatccacagagatcaaggtcgtagccacgccaagtggccgcatgtaagcctgcgaatttcaaagagaaccatatcagctattctgtctcactgggtcgtacggtggcgggaaatcctaccctttgtgtgtagacctggctgatatttgccagtcgctttgccaggacatcgcatggcatctcatatccgaacttgtaccggaactcagcagcctcaccacgggcccggtcaacggatgcgcgagcatctgctatggaaccggtcatcacacagcctacggaaggcgaaatgcggaaaacatgtgaaacggaggacgggtcgatcaatttatcctggtaaacagcgagtgtaagcgcaatcccagcgataaaccaggaattcatcttacagcgactttcttctgcgagagtaccacggcacaatccttgcccctcacaccgatggaggtgatgttggctgaagtgatagccttgaatgcatattctgagatatttggtcagcggtcatgatgacagcgaacgaattgaggatgctgggcagatcgaggcggaatcatcgaccagtggataatacataccaacttggtacagtcgaccctggtcagagaagatagtgatatgtctgtcgtaggcgcttcctgcggagagaacgaatgtcagtcggggatgaagtcatgaggttgggctgggccatcatcgacgatggagcataccagacatgacggcgaatcttcaagtatttcaaagctggattaatagaaggaaaggaaagaaatgagcaaggacggtccaagaggatgagacgatgggggttgatcagtgacgcgtgccagagctgcctgagctcaagcttgaggtcagcttcaccgccttccaggtttctctatcaacagttcaacagcacatggtcatttaccacgaatgagctcgaggtatttcacaggtagtaagggccactgcgtgaatgattaaaagcataactcagacttgttattgttattttctttgacctttagatgtgtgaaatatcaacttggaagagaaaatgaaccaactacacacacatacttcaaacatcaatatagatgacatgaggataaaataacttttgacatgaacataattacaccgtcccaaatgctatggtagagatatatacacatccaaaccctaggtagcaatgcaaaccccaattcaatagaactagtcgctgtcgctttcgctactcgagatctcgatctgagcagtcctgagctttcgcttctgtgtcttcttcggcacagcaggctgtacctttgcttcacgaactggtacaaacttctccttcctcttggcagctttgctttccttcttcgacattgtaacaccactcgcggcacttttcttggccgaagccggggcagcagacgacttgtcatcactgtcgctgctgctgccactcgatgaggtctcgtcatcgttatccggcgcgggcttgctagcaggcttcttcgaagccggggcatcatcatcgctatcctcactgctgctgctgatatcaacgaccatggttctgttcttccgcttcttggttaccgggggttcggcagccttgggtttcggtttcgatttcggcttcttcaaatcctccgcgctgaaaagcttgccggcaacagcgaaaaagaccagctctgctcgctgcctcttcggtaaacgctttagaacgtctccctccaacttttccccgaagttgaagttgtccaaatcctcatctccctttggcaagcactcgcggaacgcattgatagcttccaggtactcggggcttgttgaaggctcctggttccccacttcttcatcctccttcggcttgtcaagatccatatcggccttgatcacgtcccgcgcagcatcgctcagtcgctgcttggcggcatcacctttcaggccctgcatgtacgccagcagcgacgtgttgtacttagatgggacatgctcaagcgaatacaggtgcttgaacagattcgtttcccggttcttctggaacttccatgtcgcgcgtgctcggtggtagtggctcagatacgagagaataggcgtctcgtggattggggcttgagtcgacgcggtgccgtcttttctttgcttctttttctcccgcttgcgctgcttcatctgttcggcagtcttgtctccaacgtcttcggtgtctgcttcggctccgtctgcgtccacttcgttggtagcggcggcgtcattgctgtcggcttcgtccgactcacttgcggagtcgccatcgaattcctttgttccgggtccgaacgagactcgctttttccttttcttgtgcgattcatcctccttgccattctggtcgctgtcatcttcggtatggcggcgcttcttctttttcttcatttcgccgtctgtctcgggtgccgtttcctcggaaatggatttgcgttttttcttatccttcttgtcggacttggcatcttttttgctggaagtggactcctgtgcgtctgcacttccctcttctgtagaatccttcgacttcttgagcttcgatccgagctttttcgacgctggggactgggcgtccgtctggtgcgccatcgttgttgtggtgggttgtgatagggtcgagcaaaattcaaatagaattgagagtagcgtgacgctctaaagaaggctggaatctgaaatccagggcctgttaatgcgacctcgactgtggtgctaagacggttggcggagactactttttttctgccgatcaattgcgcgggccaatcatgttgtcttttcgttctacatactcccgaggtctctaatggctattaagggaatcaattgaaacatgtcgaaaatatggatatgggtggattgtatagagccattagttagaaaattgtgcttaggtatcttgctgatctagatgttgtatactatcaactagattatacaagctctgtgatcaactacaacatatacaaccacatacttattggtggacccgtcatctgtggataatagtttcagaaagtgattcaggtaaacttaaggtgtcgtagcctctagtcacccgtaggttggagtcattactcttttagcatctcatattatattcgttgatatttattcagctcttgatagacttgtatacacttggatgaaaaggaaaatatcgtagaactcgtcaattgcgttaatgataccctaagaaaaatgtgacagctgcaggcatctatgtcccagttccagaagcgaagccaggatcattagccccagtatcccttctctccctgcgcacctccttctgcacaaagccctcactcccggagcctgtagccgccgcagacgccgcagccctccgtttcgccttttcccgttccttctctttttccttatccctagcgttcggaccagccgcctttcgccgtttaggcagttcatagacgtcgttgaagttcatcaccacgcctaggaagcgcatgtccacatccggctggtacgacagatcgccgaggaggacagtcagacgggagcggaactcggcggagagttcgcggaggcggacgcgaagcgaagcaagcatattgtcgtcggcggcgagattggggccagataatgaaagcggggtgttgacgccgtccacgccggcactatcgggtcggacgtccggggtcgaggccattgaggccccggtgcgggtgctggggcgggagaggagatcacgctctgtgagaccccattgaccctgggcggagcgagtttcgatcttggcgtttatctcctggcggcgggtgaattccgcaacggagaaggagtataggccatccacggcatctttgtaggcaagcatgaacttgagaatctggtggagttggctgaggaagctttcttcgggttgtttggcggaagtcgaggtcgaggtgccgtagcgcgaggaggatgcagatcctagtagacccttgtgggtgatggagttgaggtatttggtgtgtgcttcgataaggtcgtccagcgtgcagtccggtctccggattgcctcgagcagttgttcccaactggactcgatgacttcgaacaagatatagtattggagctggttgacgaagtggatcatttctgcaatcacgcagcgtgctcgcttccagtctgctccgactttatcctccacattgccgagcactccgcgtgcaccggtcatgcatcgtcgccaggtgctgttcagcgcgaactcaactcgcttgatgcgccagaggaagttgaacactttcaagtattgagttgacgcccaaggtgtgatgaccacgtccacgggagcatcgattttgtattccaatgtgaagcaatcccatccaatttcaccgtggctcagctcgagcatacgggcatcaaggcgacgcagcacttcgggggtatcatattgggcattggaagcacggatagcatgttccagctgtgcagttagggtatgtcgatattgtgaatttgctggacgatccagatttgtggcaagcgactccatgagtaaagcaatgaagtctccttggcccagtagcaggtaactcttcagtgcttttaggtgatcgaggaggttgaatttcccattcatcagggtaatcaatcgagccattgtggttttatacgcctcatcaatggagatctcgagagtggcggtgtcaccatatcgaagctccttggaggcttccttcgaataggcctccacccaagccgaatcgccgcagccatgacggatgaagttcaaggattttccaatcaagaaaatcttctttgcaaactcttgcgtaatgattgaaggtaccatgtcatcatcaagcctatatttgtcctcccaaacactggttgcaagccgccgggggtcagtcttcggccggaactctggatcagcgacaaagaattccttgtatggatctgacagttcgccatcgtaaatccatagtcgtagcatgtcgtagaatgggcgtgtcacatgtgcaagaagtttctcggcgaatgcacacacgaaggggtctccgtgggatgttgaaaagctgtgtattaaggaaatcaactggccgcccctcttacctatgatatgcgtcagcaattgggaggatattcatccgcctgtctacttactttgagcctcttccacgatcaaactcattagtcgaagggccatggtagcatctctcgtccacacaacgcatcgcttcaaggtaacgccaccctttcgtacaccttgaggctcggttccttctccaatagcggccagcgcctgtctgatttccgcctctaatgtagccactaagctaagatatgcgcgcagctcaacggcaatggcagctcgcaagctctggttcaccagtccgccttcttcgctctccacaaacacagacagccctttatagagcagacaaggctccgccaacgtgttaaggagtgaggttatcggcgcagacagattcgagggcaatttcaagctcgacgcggaactaaattgcagattcgacgaagacaacccttgcaagttgaacggaaggtcacgcagtagcctctgctcaaccgacccagaccatttcgccggtgccgatggattagcagtcgagggccgagacgaggcagcacgaacatgttcatcgctggaatggtccttcactccagtatcaatgcgagtagctggtatgtcagccgagttgcgcctagcctggtccacgccatcacggtcaatatcacgtcgcagcgaactctgtcgctgtatcttcgccggcaatacgggttggtgttgctgcgaagccgacgagctaacagcgggaccctcctcatcggagttgaccatcgtgccccgtcttgggcgtgcaccatccttcctcaacatattgtgcaagtgcgcatcttccatcaacgggctccggcttcgttccccgccctctaactcatccgaagcagataacttataaagcagaaagaggataccccatttctgcgacagcacaggctgcgtcaggaggcgcgagtagagatttgaaaaccgcaccgccttatccgggctgacattttcgcggcgcagcttgcgcttaatcagatcaggcgcgttgttgatgctctccgttcccgcgaaacttccgcggcgtccaccaagcccagctggtgatcctggatctggagcgttggtgctggcgtgggtgtcgagaatgcgccaggcgcgctccatgaggacatggtggcggcggctttcggctgaggcgagcgcttcctctgtgtcggagtagtcttcgtcttggatggcggagatcgggagcgctggggtcaggccatcgactagctgggagagggcgtcgtctaagcggcgcgcgcgggcagggttgcgggctgggtttgacattctctgcccggtgccctagtgggcgaattggtcggggtcttgtatctggaagtgcttggcgtctgtgggtgctttgtttgagatattgtcggacaagagattacggtcaggcagcgggtttggggtgaaaatgtcgcgaatcaattctgacactagattgtataattttaatgtatgcctgaggtgaatatttcaattcggatctcaatagaagcaacgcggactcaagcttgaagcttgagtgtttgtgtttgagatgtttggcgcgtgtgggtgccaatttcctaaggcaccacgatcttatcgtcctatcgctagttatcagagtctttacccgatatgaatatccctgtcatataaaacttcaaggttgctcttacgacacatctcggctcacaactccatgtcattccattgtgacatagctcttcgggctaaattgcaagaattttcaatgaatcccctcacaacaattgaatatctgcttgagcctacctacacacttcaagaagaccggagcgtggccttcaccgggcaatcatggaatatgcgcaagggacttggatttttcggtctgaattccagcgattattgggctcaggctaagctaatgcacagtcagagcgcaaccaaggtgcatgcatcataggggctatgattcggggcaaatcctcgtagacccgctatagtgacgtccataagtcgttcatacaagatctgtaggatttggagccctagaggccctaactaaaaaatcattgattgattttattcctgttttatctctgttctttatatgttcttccatttctcttcccatgtccatactttaataaaccaaatgtacaatctcctagtatggacacaggaacatctacctctgccaacgctcggccatgtttccgacttctaggtaatgcaaagctcaaattactcgctgtattcttgacgacctcgacaatcctcctactcacactatattcggggggcttgtccgaaaacatctcacctagcgcgaaagacgagctagcgaatgagaaagactactggacatgggaaacgagcactcgattccagaaatccaagcatgaaaacgacagcaatgacactgggaagtcccaaaatgcgacctgtgacacattcccgacagacgtgctatcgcgcgtccagatcatcttaaagaccagcgcaaccgaagacccaaaacgagtcgatacacacatggcctctgtaacccgctgcatttccaacttactagttgtgtccgacaaagagaccgagctccatggccatcgcgtacacgatgtcctagccgatctaccaccttcagctcgggatctgattccggagttcgaagggtatgatgcgctccaacgcggggagagtaatgtcgacggcgcgacgggctggaaactcgatcgattcaagtttcttcctatggtggagcgggctagaaaagtcaaccccggcgcggagtggtacgtctttctcgagacggatacttacttcgtatgggataacctgttccgaatgctgggacagttcgacccatccttccctctgtatatgggctcaccggcgccgggccgcgatatcggtaatggaaaagtcaactggtttgcatacggcggctcgggcttcgtgctgtccagagctgcggttgatatattgacagcgcgggaggttggtaaatacgggcagtttattgggcaatcgctcagcgaacagtatatgcagacggtgaaagatgactgctgcggcgactctgtgcttggatttgcgctgtgggaaaagggtgttgagttgtctgggatgtggccgatgttcaacgcgcatccgctggactcaattccttttggcgacgagcatcactggtgccagcctgcgatcagcatgcataaatctcgattgagtgatatgaccgggttggcgaactgggaaggtgagcgggatagaacggtatgattcggtttgctgaacctagtggtacacacatgcacatgctaatccatttcaattcagaagcccttactatacgcagacttggttgattaccatcgcctcggacagttgccagaacggaaaggatgggataatggagcctggggtgggattatcgaacatcctgatactctgccccagcatgggtcattagaagcctgtcgacaggcatgctatgacagggattggtgtatgtcttacacttatgataccgccggggcctgtgtgtttgtgcagagcttgcgacttggagctgctagcaagctggaacttgcggaccaattcacggctggatgggacaacgacaaaatacaaaattggcgggcaagcaataagtgtgaaaagcccatgtggatgaagccgagtttgacgagaattttctgaagcgctttaggtacacgacttcgaagtgatttgatatacgttaataatggatatacgatgtctgaggatacatataattcctacagatcccagggcttaagagttgcaatcatgaaatacaacgaccctctacatccagcgatgtaccggatgaagatctatgaatctataacgtgacactttcaaagcgattgtcgattcatttgcccaaccgtctggttcaaagaaactagtcaaaacacatcaaaaaatcacaaagccatccgtacgccgcccaggaatcatgtatttcgacacaagcaacccacaaatgggaaaacaaacaatgcaccgaagtgccctcaagtattagacaagcgaaaggtaaagaatcctcggggccatcaaggacaaggattaaagaaaagagaaagagaaagcgaagaagggtaaaaaatacaacaagggaaaggggaacgtcataaaagcagaaagaacatcaacctcaaggtagccataagtagaaagaagaaagcatctcatacgccggattgacacaccctcaaaaaaaggtcattccagaccaccaagttagtccgtccatttttgagtcgtgaggatcattaacacctgcccatgccaaaacagtcggcgtagccttagccgaaagaaaccgcgagtaaaacaaactcctaggaagaagagatcaaccgccggtatagcggtgaactgaatttcctacatgcggcgaaaagcaagataggtatcttgagatgagaaacaaagcctgttttctcaccgacgcatgccctgagtagggatgccgccctgcatacccatgttgggcggcatgttatacccgtggtgatcgtatccggctgacatgccgttcatcataagggaaccgagcccttgagcctgggagaccgggcagtctttgtgtgccagcaaaagagtcttgaggttgacaatctcttcacgtagttgagtcaccgtcgcagtaagggcatcattttctgaggtgaaaagctccaccttgttttgaaggttagccagccactgcttcttccgttgacgacatttcaaagccgcgacactgtgtacaaattagcatttcaagttcctgaatgtaaggtggtcattcataccgattccgctctaggaaattgcgtcgtttctcctcatcggtcatcttcttggtatccattgggaattgcttcatatcatcgtcgtcttcgtcctcgtcatccatatccgaaggcatatccatgttgggtttagcccttttgttggaacccttcggggcctcttcggccttgcggcggttattggtggagcccttggtgttctttttgcccttacccttggcgggtttggcggattcacgatcagatgcatccccaacactggtaccgttggtgttctgggagacacgtcgggcagctgcggatcgagcatcatttgacatttgggcatggttcattggcgcattgttggcctggccacccttggccagcatgaacagtccgttcgccgcatctgccgcgtcatgctgagtgaagtcagccggccgagctggctttacttccatattgacagccgcctggtcctgctcattggggttggaggtgggagcatttgaattgttcttcttcgctgtaagtgcggtgcggtggaaatcaatggtggaaggagtggcgccaccgttctgaagttgttgcaagagcgcctgtgagttgggactgggggccgggaacatagagcctccaccccccggtgtcagtcccgtgcggagggaggactcgttcggggtagggaagccgcgaccgatgctgtcaaagtagtcattggggccagtgggcccggggagcatagccggactgagaggacccgcgcgtagggagttgttccaattgtaaccacttgacgaactggtgccaggtaaggccggtgaagtcagggcagccaccgagggaagaagcgatttgcctggggtgtcggccggattccctccaaaggattgctcaaatggattgggctcgagggagaaaggattgtgcatggaattgaagtagtccggagtatcagacgcagtaggcgcacccggtcgtggaggtggcgccaacgaggtctgagtctctaggttagatttctggtcctttgacgcggcctgcgagtctggcggagaggttcgagttagcaacgcgccaagaattaatgcgatcgcaaataggtaccactgcggttttgggatcgagccggtggcttcattgtgtgtggaatatgcatgtgttggtggggaggaaatcaatgacgccagtgggtgaagtcatcgcgacggcaaaggacttggggggaatttaagggtcggggaacagtggcgtattaccaaaccaaaaaggggacttttcttttttggaagtttaatgcagaacaacataaaacgagggcagcagctccataaaatcgcatatcacagtatggtaaagcaaaagtacgaaggaaatgcgcaaaaaaaagtgtcgtgacacgaaccttctttttctgccttcttcgagtccataggggatgaagacatgtttgatcgcagagtcgatatggctggggcgaccagagcagacatttagctgggatataatggatataaaatcggtgaagccaaacaaacaatggcttctagatagtcggagagagagtgagaggaagagagtgacgtagggggaagagggatatgatgaaatttagggaatttgggggttttgctgatgaaaaaaacagaattacggtcatgtattgtattggaatcagaaacgggacggattctgtgtgtattcagcataaatgacggtaactggctttctccgaatcaggttggctgttcgtctccaccagagacacattattgtgttccttttctgctgttccacatccacgttgttctactatctcagacattctacgttctgtaccatgaggaacccctacacccttacctcggatcttcaccatacggcagaggaccaattggatataccaatcctcatttgccagtctagctgcgagaatatcaagtcgacgcttgcatctttgatacggagtttccaaggttggtctctgggtattatatccattatgtcacggtgacgacagaaatctctcccgctgtgggccatccaccctctgacagccaatcacaaaccattattccccagtgccaaggccagggatatcagctaacccgtagaatgcggtgaaaacgatgacgcaatcgatagcacgtgagggctctaccatggaattctagctagatatcttgatcttcagatatgtagaacgttgatagacagactatacacatgttggcagggtagtagatgccaaataggagacagcgagggctctactacatcgtacctgaccgagatctgtatgtgtaagcttgtacaaccccatgtaaaattattaatcagcgacccacctggtatccatggatggataccccgtacgcgtcgtattcatacggagttctccgtattatacaagttcgagatcgcgtccactcggttgtacagtacccaaatacataacattgctattgactctcttctgacgggccctggtctgatgcaataggctaatcccatgtagaaaggggattttcttactgtactgtacccggtagctggtacgaagtaataatcttatattaaccaactagttaggagtgtcgcgagaacgtgtggtccattgcatacatcgtgtcaatcttaaattgaacgccaatcctttcgatcgttacaaatagtgatctagcctaaattagcctttactcactatgccattgggtcggtttgaggataggctgttcccacaacgggagagacacttccccacagtcttggtatgcttcaaccttgattgtacgtatatgcatcacctgtctattgtgaagtagggtgctctaagtggaattagcttaattgaaatacatattgaagctaatatgtcttttgaaataacgacctcatatcaaatagtataagatgttacggatgaaacattacttccagcagtatagcagaaaccaacacagtcgagatactaggcgatccatttaacaagcttcaagagtaggctgcccactcgagctcttagcggcatatagctgcaatatcaactaccttcaatgcatgacttactccgcggtataactgctgaagataggaaagcccgaagtatgacaagatcttcagtgtaggagtggttcgtgtgcggtttctttttccgagagcaagtggacgttcgatattacatctccagtaaagccgttatcctcgccttcctaaataggcaggcaccccaaagtctacacatacctagaagcgcaaccgattaatggaaccacagccaagatttacgcttggaaataacacattcaatagagatagtccattgacataggaattatatctatcaagccctggaaagattggaatatttacaattcccccatcgttaaagaaccctcaattataccacaacttcacgaaccccggtaggtcgagtagttccaaggacccagcaggacaggaacatgataatggcgccagccctcctcgccctcgcgaccccgtcccttgacagtgaacttaacctcaacctcaggccagaagctctcgacgccctgggcctcataccagggacccacgtcgaagcgcacagaccagttggtcttgctgtctgcagcaggcagcgcagccaagatagcaggtacggactccgaggctgttccgacgggcgtccagttggcaacgcggccgtcggcgttggtggttgcgcggaatgagatgctgctggcggtggatgcaggcgtggagaggagagtcagggtcacgggcaggttggctgcgggtgtccctgataacgtgttgaggcaatggcaggtgatgggatcgcgcgctgccatggtggtggtgggttgcttgattgggtttgcgtctttggtgtgcggggccggggagatttgttgctgataaagtgcgaggcggttggtggtgcgaccaagttgttggttattttgaggggagtccattcattcaaatggtagagggaatataggagaagaagagaagaggggagaaagaaatacagaaggaggagagctcgacattgctatcaaaggttcatcggaggataccgatggccgcggagagtgccatgcagctattaattgggggtctatgacttgcgcatgtatgctgtatagcttcttcgcttctcctctttatgactatctataggaaatagaatgatctctattttgacagcttaaatgcgactttggattcgaggacaaagagcttcaagtgccatagaaacctttcgaattactagtagaataatcatgatcatcaggagcctgcctaaccatatatattgaatccaagtcaattgtacgatagaattagaaaaacatccaaaacgacaaagttgaagcgcatgatgtgaaagtcttgtcttccggaaagttcgatttgcggggctacttcgccttcaacttcccaacttcgcaacattcagaacttcaacaaatcatacacaatgtccgccgtggtacatagcgatgacctcgacatggagcctacgctccagtcgattctcaaccaacacactctccgttggatcttcgtcggaggaaaaggaggtgtgggtaagaccaccacctcgtgctcgctggcgatccagttggccaaagttcgcaaatccgtcctgctcatttcgaccgatcccgcacacaacctgagcgacgctttcggccagaagtttggaaaggaggcccgcctgatcgatggctactcaaacctgagcgcgatggagatcgaccccaatgggagcatccaggatctgctcgccaccggagatggtcagggcgaggatcccatggcaggattgggcatgggaaacatgatgcaggatttagcattcagcgtaagtgctatgtcgctgtcgcgtaatactctacgtgtcaatctaactcttggtgttaccagattcccggtgttgacgaagctatgtccttcgccgaagtcctgaagcaggtcaagtcgctttcctacgaagtcatcgtgttcgataccgcgccgaccggccacacccttcgattcctacaattccccaccgtgctcgagaaggcgctcgccaagctctcccagctctccacccagttcggtccgatgctcaactcgattctgggtgctcgtggcggtctacccgggggtcagaatatggatgagttgctgcagaagatggagtcgttgcgcgagactatcagcgaggtcaatacgcaattcaagaacccagacatgaccacctttgtgtgtgtatgcattgcagagttcttgtcgctctacgagacggaacgtatgatccaagaattgaccagctacaacatcgacacccacgcaatcgttgtcaaccagctcctattccccaaagaaggaagcagttgcgaacagtgtactgcccggagaaagatgcagaagaagtacctcgatcagattgaggagctctatgaggatttcaatgtggtgcgcatgccaatgcttgtcgaggaagtgcgtgggaaggagaagttggagaagttcagtgagatgttggtgactccatacgtgcctccgcagtaaaggcgatgtcgaggcgagatattttgttttcgctcatgtcggacgaattatgaaaagactagagaatattacgtgaagcgttggccttctgtggactaagattggaacccatgtagagcatcaggacatgaattcatgcatattctgtcgcatcttgactgacctgtgatgaaagtttgaccacatctcggtcgatcggagatacaacacaatccttgtcaaatgacattggacctaatatatatctgcgagaggggaactccaatcgttccctaaactcgtctccatctaccacgtgtttcgaccaccccccatatacaatatgatcttggcaatttagaatgcatgccctcgaagcaagtgtatgcccaaaagcgagagatgcagatgtcctcgctgcagctcagtggtccccgcgatctcacggccacaatccgtggtgccacgacaccaccgcatcaagaaccaatttggccctgcatagatttgataaaatctgcggtgagagaaaagcagacgtcagaagtcacttccactttcaaatattcctacaggtactcgtttttagggaaatactcccggagtagtccaattctatgcgccctgggattgattcgagcccgatgctcctccatgcaagcctcacttttgtccaagacagggcccttgttactctatagtaaggagtggaaaaagtgggcagaccaggatcccgtttcatcctgacggtcagaagctctaaattgacacacatcaaggtaggggaaaaaagggttgggcctcgttggccgataaagtgaggcggttctcttgtcctccgcccccgaacgttccgacatgaaccctcccctcgaggggaggacgcagaatctgagccgtctctggtgatttcctggtttcccattcttctttccgccttccgtggagactcgctccagagttaccggattcgtgggtatgtggttggtttaatttgcctatgtgcagccgacctggtggatcgtgctgttggaagaagggggggatacgcggtcccctctgccgttgacttgttgtgaaaccatattccgaaggatcaaggttggagattagtgcatttccgatagagatctgtcttattcgtctccgtctctggtgggatttctattcgatcaaccagagtatcaaccaacatatttatactccaagtctcgtccttcggagctgtgccaaaagtcccaaaaagagcttccaagcacggaccgtgtcgaactagcaaccctagcccttacttcgcctcgccttgacgcctcacctcttagccctggcaatgtctcccgtccagcaatactggcttccgggatatgggttgtcccgacatattgtcctaggccatatccagtactttcttggaccaaccgcaacagtcagaccctacagttaccaggtatgtcttgccattgcttccactacaccttctctatagcctgttctaaccagttaccattgcaggggcgcgagggttatctcatcaatggcgtgccactcacgcgggtttgtttcccccatctttatttaagcatgaattaagattggaaagagagaaagagaaaccaaacattacacaccactaacgcatccaaacaggaacaaattgatgatcttgcggtaatgtcccgcgagtatgagaagcaagaagctactcgcatggcccacaataccagcggcgcctcgacttctagccccagcagcgacaacccggcagctcagtctgagccatacatcaatgaaatcatccctattaaccaaccgggaacacgcaggcctgcagactcgcgaggcggtcgttgagaccgacgttattccattgcttccgtccattggactcggtgttccttttccagccctgggctccgttctaggattccgtcggccagcgaacatcatgaggatggaactccttgtatggcctgctctgtttagccttcgttccccgggggctggccacatggatacccaacccctgagttctgtttcccaggttcccaggtgaatacttgaatcgcaaagccaccggatggaccagtggatggaaaagaacaccaatcctggaatgggagcggctgttgtgggcaatagcggtagccctgttttgagcatgtgccttttgtttcgttctgatatacccttctttcaacccttttagtttcttataggtcaaatttgattttatacatttgaattcgggattcgggactgttagcatataacagattataagctcgactgatattttggggctgggagcggaatgatcctcaactatggctggaataggatataaacgtcaaacgagtattatgctgacacccagaatagaatcaatatatttagttctccaacgctgatatgatatagttactaggtatcaataacattctatgttgaaaacaaggatacttcggaacaaatattgccaagaaagacatcatctttcactcatctctatagaccattcgtaacagcatagataaatcagaccctaagatcaaagagcctactacatcatatctccatctctcatctttttttcccctccaaagattcgacggggggcgccatgagtctctggctgcttttggggaccctccctgtaaacctccagggtcagaaatggccaatacataaagaggatctgacacaggaagtaaaaatatggggagagagtgattgcataagaactgcaagactaaagaggtaaaagaaataagtgtggacccccgaaaaaacgccagccggatgccactctgcatgaggtccccaaacaaccgtgttgtgacctacacggggggatcactggaaaaaaatggggcaggcagaaacaagttggaaatcacataacagagagaatttcagttttcaacatcaaggtcatgcgggtgctttttattttgcaacagccgagctcaagacttgtgtgcggaagaaggcacccttggtcttctcaatgacttgctggtagaccgactgaggggggtggttcatgataacagtgccctccttgtaatcgatcttggcgtcaacccgggtgtcgcgaataaggttgacaatccacttctcaccctcgtcctggttgagaccgaggcgggcggaaaggtccctaaaaaagaaaccgttagtctactgttcgtgccgattttcccaatgtaaataacttacttgatgtcgatacgctggtgaatcttgcagtagctctcggagatgagatggcgggcagcgtcaacgaaagcgtcggcagccgacacaaggaagaaatcgctgcgcagcacatcctctgcctcgccgagcttcttctgtgcttcctcgaaatcgaaatcgacgtaaagggccttgacgaaatcggtgacggggtcggtgtactcgtagtcctcctggcgcacaacgcggatcagatccttcaactgcttctggtagacaccggagtgcttgtgggggcggctgcggttggtgatgacagcggccgcaaggtaccgcaaaacccaagggcagctggtctggatggtgttgatgtaggcgggagagaagaagaggtcggtgaggacgtcgcgggcggggtcgtggttgaagaaggggaacagcgaccagtgaatgagccacgagcggttgttgagctgagccagggggttgttgaacaggcgagtctcaattgagtccttgaccttctgaacctcctccatcgcaccctcccagttggtggtcaagatctctgatgcgagcttaccccatgtggcggcggcaaccttgtcgttgtcggtggacagaacacggaactggtaaagcagttcagcggcatttccataactgccgcagctgtactggaaccgtccgtagtcgtagagagagttgaccatctcgttagtgacaccgtgctgctcctcgaggaaccgcaagttggcggccttgtcgcttcgtaggttgcccacgacctcctcatcctgcaacaattcggaaatcttctcgctctgatcctggtaatgctgtagcttggccagaacctcctcgcgcttcttcacaaactcctcgggaatcgtgtcggaatcgttgatctcctgccacaagttggcgacgtagtcggtcatgttggtgtgcttcaagagctcgtacttcgcccgagtaatttccttatcctcctcatcaccggtagcgctgaattcgagtagggggaagacgaggtgacggtcgaggtacgggatgagtcggggcagcaaatcatgctgagaggcgatatcctcggcggtcttaggctggtgagcagcagctccgctgagcatagtctccgcggtagggggggcgttgtctgccatattggatatcaaaagatggcagaggggggtaaaaggtctagagggggatacaaaggccaaccgcgatcaatggagaatttgcagattgtgcgggcgtcggtggccctaaaccctttttggaagtgggtgctgggaaagcggtggcagaaaatctgagcagaggagcatctgatgtcgctctccgatcttcccagtctctgccttgatatccccatattctccaaccaggtcctttctttgtgtcctttagaacgcaagaaatgccgtctcttctatactctagcccgccctcggccatgcgaaagcaggtctcggccattcctcttcgcgtcaactctgcgcagtccgtggcttccgttcagacatgtagttcattttccacattatgtcctcaggcaaggctgaaagcttcacgtacgttactttttgctcagtcttattgtgattgcttgatctcctaggaactacaagagcaaagccgaaccctcgggttctgtattgtcttgtaaccaacaaagagagaaagaaaatgacaaaaaaacacgcatctatgctgtgtcggtttcgtttcgaccgaggaaacggcgcatgactaacccttcatctcagatcgtcctcaattctccctccctactcttcctacccgtcaaagccgtacctttctcgctcagctcggccgtcaagcgcaagccctgaagcaacaatctaacaccccatcggcggccccatccccagccacatcagacaagaaatccagtccgaccctgcagctcaccaatctcccctatttcgtccgtcgcactgcctccaatcagctgcctgtctacgtcgtcacaaaggccggcggtaccaaacaactcaccaagctccagaagaccgaaggcgatctagtcgcgctccggaacgacctggcttctgccctgggtgttgttgatggaaacaagcccaatccggatgttagtctcaaccaattgactggccacatcattgtcaaggtatgtttgctttacagtgcaattaactgtcatgcgacagaaactaatatattggttagggctggcgcaaacctgagattttgaacttcctcaatgagcggaaattctaaatgctctcttctcttacacctcaaatttcatctcatgcgctcgcaattgaaggtctcaccaatatttcgagcggtccaagattcactctcaaaaagcatcatcatacctcttttgcgaggggtattctagagcatacttctcggagagagcaagaatcacatcacgtcgaaaacaagggaggggaaagaaagaaacgaacgctcacgatggtccctgatgtggatggatattatctatttccttgatctcttcttcctcttccctcggtgcataccttaatctcgttgcgggttgtttttcttccttttcttccttttcattttcatttggtgtttgtctcttgtttatccggtcgtgtcttctggcgtccacctgcttttttttttgtttttgttcccctgcttttcccatctgtaacactcaatctgtacattttcgatgactctatggatgctagtgcttttatattgaaatgactacatgcatttccattcggaaatctctcgggaaactcgtattgatgcgcagtatgtttgctcctgtctgcaattagaatgtaggccacgacctatttaatactatgcctgacgagcggatggaattgagggctgtctctgttgaaaacttcgatgtagctgggttgaactacgaatgtgaatctacaaattaaatgggaacaatgggcaatcaatcatgatgcaagtatctctcgatttgtgtcgagggtattttgagcattgtacaccgaatcagaacagaacgctatctcacgagaacaaaaataaaatccccatcacccaccagcgcccaaaagataagaatagaaagactgacagtcgacatgagagtacaaatgacatgagagaaaatcaagattgtcgtatatgctaagtggaagaggatccgattcctccaaaggcgggactggaacgaaaccaacctgtcaccagcgcattggaggttcatgcagacatcatttactccgccaaccgagcatatgtgaggagttggcgaacaacaccaccatcgatgttggggaggagtagtgcacctagcagactttcttttctgggaaggattccggatgggatgttaagaggggaggtgttgtcgacttgctttgatttttcggcgagtcggcgtagaatccccagtcctcgattgacaatcgagctgaaggcatatgcgtcggcttcggcctggcttctttgccgcatgttgatttgtgggattcgttctgtgcacagtgcgcaggaaagtcgcaggagatggacagcgaacccatcaactgactcaagccatgctttggcaagagagccatcggcaaatgtggtgagaacatcggccgacaaaagaccttgcatcaaaaacactttgcgtgcgtccacaacagccatgggctttttgtcggggacacaggatatggcaagcccaaacgcgcgggttaacaactctggctggggaggtgcagacccatcaccagagaagatggctttgaagaaagttcggttcgggtcatctctagccaacattttggccagcccgtcaacggcagctggggtgtatcgatcaaccgaagagttgaatgcagtaaacatcacttttccagcgggtgatatgggttcaggttcaggcgagaacgccaacaagaaaatcaacagattcagcgcctcgtccttgccgggaatttgaacaacatgcgccaagttactcagcaagatcactgcatccttcataaaatctaacgtgttgtggcttgtccgcaggaacatcttgcgagttcccatgtaacgaaagacggaggaaaacagctgagcgacaggagggataccgagagacaagaaattcgtctcgctaaacgagaaattgcgcaggatagtggtgatacagatgagtcgatcgacggcccggtctagttcgtactcaatacttccaaattcgggaacatctaaaagcgatgtgttttcagactggcagtcccgtgtgacttgatcataggaacggagagtcatagtatccgactcttccaaggtgtgctctgctagaaggtcggcctggtcttcagcgcagtcgatcaggctctctaccaagtcatcacaattctccaatgatatctgaacagatggttcaccagaaagtgttgtgagggtatccaaagcaactcgtatctccgcgtagatcccggacttgagcgccattgtcaaggcgtggatatcgacaattcctagttctgcaaagcctggcacatctggctttagcctcgaaatatcctcgccaatctgatacatctcatcaacggcaatgggcccgtggaatcggtttcctttcagaaccatgggtttgaaggtttcctcaatagggcgttttaccagctgctcggatttttgttcttgttgtcctggctgctgttggcccggaacaggcgtaacacccttcacagattggggagaaggagctgcgaactgtccggtggcttcggtgagtggaacagctggttgcgacgccctcgagatgcttgaccggtgtccggcctgtgctggcctgctttggcttcgtgcgtgcgttggcgttgcaaatccattcactggggcattattatgaattggcgtgtgattctggggggactgtgctatcgcctgggcctgctcaaagcctggattaggcttcactgaaggagactggaattgactaggcggccgctgtatgccgccttgatgttgcagttgttgctgttgctgctgctgctgctgctgttgttgttgttgctgctgctgttgctgttgcaattgttgctgctgctgtaattgctgctgttgcatttgctgctgctgttgctgcatgtggtccgccatttgtttttgttgtgagctgatgaaagcttgttcgtagggagccaaattccttgagtggtgagcttgaatctcctgggcagccataggaaattgcatctggggaaattgcagctgatgtgcaactgctggccacatattcgttgctgtgacctttttcgaccctcccatcttcatcacggtggcgtagagctgaacgaggttgatcggacgtccactgacaataggatttgtgtccacagaaagattctggctcatcatgaatttttgcaatgagcgcaaaaatccttccgggttactgggttttgggacgttcgactgcatgttcggtggcatttgtctcataccccccatggactgctgaggattacccatcgggttcatgcctccttgaacctgccgtccagccatcgtggcattgggattcatccgtgactgttgctgcatggcatgcagccgctgttgttgattcgctagagcttgatggtagccctggggtacttgttgcatgccattgaactgcggcgcgagcatcgagggttggggaggtcccgaagtcattccaaactgctgcgcctgcataaagttggcgttctggggcgtatttacgcgactgccgtgatctgactgcgatggggacatatggggtccggggtgcggaccagcgggcgagaaggggctcggagaagccgttcccaagcgagcgctttgctgatcaaagtcctgcataataggcgaatgcgttacattcggagacgccccctgctgaagatgctggtacggcgttgggtgttgcggaaattgcggattgccgttggtcggtccttgataacctggaaacggctggtgaggggtctgagatcgcgaccccgttaagccgcccggtactggtcttggcgacatgggcataccatcttctggccgcgctcgcttggatggaatcacttggtttggattgtggaagcctggggaggcgttccgcggcacgccattattgaacatgcggaattgagatggatcctggggggtgggggagccatgaaggaacgcagtagagggatctatagtggatggatgaaaggcgccattatcctggccaggaatattcgaggcgtcgagccaggcattcatgtcgtgcggttttcctaacccatctacctaggacgagtcagcacgcgaacattggctcatgcaaccatcgctacaatgtgcaaatatgtcatctaagaatcaagcaagtataggattcgatccaatgatggacgatcaggtggacgcgtcgggagtgagatgtttgggagtcgcgcccagacccggtcgcgacacgggtcaaagagaaggtggggagggaaggcacaaccatggggaatattagagataataagggggggaaatgaggggagggaatgaggtacataccgataaggctggagtgacttgaattccgccttttatacggatgactgaagccgggtcccggaactggcagatggatatgaaggggacagaggttggccagggaaagtcacgtggtgtggaaacctaaggcaacaaaccacggaggaggacgggaggcaaaggcgtctaagatgggataatgggggtgggaagggggggggaggtcagaggctggggtaagctaaaatgttagcaaatcatagaccaggaacgtcactcttgatctttaaagagccaagctataataatgggaagctcgttcagaaaccacggggcaaatgacggttacagaacaagggcaggacaaaagggggtgcgtggccacaacccaataatctcaataccgtgtaaataataggaggagaacaagaaaaaaaagcaagcgacacgatccgatcaaccgaaatggtgtacttaccaattcacatccgttcagttagggatgaagggggaagtggagagaggagagggaaaattactgacaggtcagagctttcagtaacatcaacccggagtgttgtgcgggttacttgtgttactgggttagttcttgtcttttagaatctcgtcctgctgcagttttcttcgtcttttctcgctcgtctctttctttctcttttttgggcgttcatttttccccctttgggtctggatttcccattgggtttagttatcttgttcagagcgggtgttgccagcctcaacctgcatatgaaagagactggccacacatcggggaaaataatggggaaagccaggcaatagtggtaatatgaagggaattctctttctgaaagaaaagtctcataaaaatccccatcttcccctcggatttggtgaatcagcgaaatgatgatccattccaacggtctgcccgagtcaggttagatcgtatactccaaccccgatatggtctgaggttagcagccaccctagggataaatcccaatgagaaaaaattgccacgaaaaatggactatttccagaccatcatctggggggaaggggaaaagaaattatggaggagagaaagagagagaaaagatctagagccgcgacggtggccagcggttctccttatataaagctcgggctagcgtctgataatcatgtcgatgcgcgcccaatcctccgaaatcaccaaaaattcgaggttaacaactaagagtggattgacctgggttttctagtcacccccgtgctaggatccgactcgatccgcgtgggaaatcatgacggctttggtgcctgtcccacctaccgtgtctcggcctactccaccactagagatgattggatcaacttttcttcatttcccttctgtagggcttcgggggggcaagcttgaggtcatgactaactccaaggggacggatgcgtgtaactgtctaaaggcccttgcgcatggcggtccaatatgatattatcccacgtcgaacctgatcaggtgtccaaattgacatacgttgtgtatctacatgtcactagatgtaacaaataccccaggcagagcgtgagatcctcgttattggttctaaggctatatattccgcagtagccgctagcgtctgacgataaatttggattgatacactcacctggacaagattagtacatattgggtatctgggcacgatacaggaggattatgattagagctatcaaggatttccaaggttcggtgtaatttatcccacagttctgggtgagattattgcattgcaagttgacgggcgcttggtttagtagtgtaccgtatcgctaataattgccacaacattgaatctttaaccttcaaatgatgcgagtaaaccacatgtacgccgtattgtagaaaataatgggactaccaggatgtgggacttatgatatatttttcatgaccctaacaaactggaactaaatctacggagtacaacgaactgttggcaagaccagtcgacatcacgtgatggataagcttcctgccccatagcatcgaaagctccagatggctgaactccgagcccttcacacagcgcgtcattcaccaaccatcttcaaaactcatcacatttccttccatttccagctgatacacatactctcctttctcatcttgctcgctatccaaactatccaccatgggagacgttgccgtggagtacccggcaaacaacgtcacgcctctgaccaaactcgacgcccttgccaacttggattccctcgatggtacaggggctgatggaaatgatgaatatgctacccttaagaggctacagagacatctcgagtatgtgtgaccattatcggatggagtggtctgtactgacgtcgaacacaggtatatccaactgcaggaggaatacatcaaggatgagcagaggtatgcttattgagttctgttattgaagatccgtatcagtggctaactaccgtcgtccgatacaggagcttgaagcgggagctggttcgggcacaagaagagatcaagcgcatacagagtgtgccattggtcatcggacaatttatggaggcaatcgatcaaaagtaggccttttggtatctggatctctaggcgagatcatcgtttgctaactcacttctcttagcaccggcattgttcaaagctcgaccggttctaattacgtcgtccgtatcctctccactctcgaccgcgagaagttgaagccttcatcctcggtcgcccttcaccgccactccaatgcccttgtcgatattcttcctcccgaggctgattcctctattgcgatgctgggtgagaacgagaagcccgatgtgacgtacgcagatgtcggtggtttggatatgcagaaacaggagattcgggaggccgtcgagctgcctttgacgcatttcgaactctacaagcaaattggtgggtagttatggagatccattgcgggtaatgggtccgctaacaaatttcaggtatcgaccctcctcgtggtgtcttgctctatggccccccgggaaccggaaagaccatgctagtgaaagccgtggccaacagtacaaccgccagcttcattcgtgtcaacggatcagagtttgtacagaagtatctaggagagggacctcgtatggttcgtgacgtcttccggatggctcgtgagaactccccagccatcatcttcattgacgaaatcgacgcgatcgccacgaagcgtttcgatgcccagactggtgccgatcgtgaagttcagcgtatcctactggagttgcttaaccagatggacggtttcgaacaaaccagcaacgtcaaggtcatcatggccaccaaccgagccgacaccctggacccggctttgctgcgtcctggtcgtctggaccggaagatcgagttcccgaacctgcgtgaccgacgtgagcgccgattgatcttcacaaccatcgcggcaaggatgtcactgtcccccgaggtcgaccttgacgccttgattgtgcgcaacgacccgttgtctggtgctgtcattgctgctatcatgcaggaggctggtctgcgggccgtccgcaagaaccgttacaatattatccaatccgaccttgaagatgcttatgccgtccaggtgaagactggacaggatgatgatcggtacgtttcttgtttgtttttgggggttttctatgtcactaactgggttcttgcagtcctgacttctaccggtaaatgcttgagtttctcggggacgttggtacaagtggtaaaagcttggttttcctcaccagttgtattatcaataatatgcgccatgtgtcacaatgtttggattatgtgttgatcttacggtctccgtttagattgtagatgtagattgtaaattacaccctgcccgtagaccacttgcttgaaaatgcgtttcgaatgaatgttgttttaaatacgttggaaattgttccctgttattcttctatcgaataaccaatctgattgcagacagtgtgtatatattttagaagcggataacccgaaattcgcgatatatacctccacttacaaccaccagaatctataataaaaagcattcaagaaaccaaccacacataaagcttgacacttgccacttatcactcgaattaaaaaaggccacatagaaccatatgacaaggacaagcatactaatcggtacattcacaatgtgagcttggttatttcaatccgataatgctcctcccggtcgcgactactactttttgctttttcttcttttggccttcaaaggttacatacgttcttagtacgcaaaacgttagtatagttcaatatatatttacctatgcttgttccaagtagtagttatttccgatatgtatacggacattacggagtactccgtatgctaaaagccccattataaagttttgtttacccgcagttggtagctactacaacatctgtcgactaactaaccactgtccttcatggggtttgtagagaccttgttctgatttgatttaaataccacgttcgaactaaatatcccgaggagcttctttcaaggctggttcaaccaattcagcaatcccaattcagcaatctcttaaaacaggagaatctgaaaatcccatttcttccgcagtacgatcccgaatccgaatctatatatttgcttccacgcaggccttcctcccacggtcctctgacaccgcaaagcttcacctggcgggcgctgctagtcggactgctagtcgggatactgatcagcctttgcaacacttattatggcttacaaaccggggctggtgctcaactacctactgtgtcggctcttctggggtatctagcgattggagcacttgctaaattcaactttgcaccgctatcgaaaactgaaaatgtcctgatcgtaagcactgccacggcgacgggctgcatgcccgctacagctggattcaccgaggtcatcccagcgctcgaatatatccttgggccaaacgagggaggcccattccaactggagtatctgcagttgataacctggtccctgggactgagtttcttcggaagatgatagcgaagatatacactcttccagcatgctagcactcggtaggagacacatgagctcaaatagtggttatttcccggtggtgggcttcattgtgtcaatactagcctgtatccttaccacacattccgtattcggagacaaaatgccttcgtattacacggttgtctcgatcctgcttgtcctggcggtggcgatgactggcattcgtggtctggcggaatccgacttcaacgcaggaagcggtttaggtatggcctactctgtcagattatatcgtcgtcattccagaatatcatctctggcctgagatcgactaataaatatcttgtgtgaacagctgcccagctggttttggccgccataatcccccgctcaaaccctaatagcgtgatgatcaatatcctatctgctgcaatcgcaaatggaggtgctaaccaggccggcgatcttgcctttgacttgaagatagggcaactcatcggtgcgccatcagaagtccagacctacggccagataataggatcgattttcggcgcgcttgtctcttgcttcatgtatagactgttcaccaaccgattcccggttccaggagacttcatccaggtaccaaactcgttcctgcaagtcagtaccgcgagaatggtcttgaataaagccttccccctggtgtgggtggttacgccctgggctttggaattttcctcgccatttcaacagtggccaagatgaggtttcaagacaattggtggcatgtttatattcctagcggagtttcctttgccattggtaagccgttctctctattttgggaagactctatttatgttaatgatgttaatatcgattcacaggcatatctactccgagttttagggggagttttcatgtgggcatacctccgccgcgtaccatccaaacgcctatccattgtagtgttagccagcggaatgttgctcggagagtctctcggcagccttggagagcttgttttattctcagtgaatgctcctcatctcgggtgattgtgggagtttgtgacttggcgcagaaatgtgcatacatatcacaatgtagctataaaataggggattgttacgcctatgtacctgcaatttgtatataaaccactaacaacattaagtcacttttatcacaacaactacttcatcgtcgacaactactttaataactacttcaacaacagctccaacaactgcctcaacaactggtctatcataatcaagggattaaaacagagataagtctggcagaattgaatgggtgccttctatgtaaggcgaggtagggtggttgagttatatccccgaggtcctccttccaaggttaagcttcacctcctcctaacctttagggtgggcgtaccatccacgtgatcacatagctaccttagtcccgctgctgtatacatcatcattcttcccctgagctactggccaggctctaaggaacatgccaaaatggccgcacaccatcaatcttctttggaagatgtattatggaagtgaatcctaccaggttatccaagtgatgccaccggatatcgtcgcggatgatttcgtgctgctctcacttccgcccggtggaaacccaataccatatgtgtactggaacattggcgtgacagagccagagatgtgggagaaggcaaataaagaaggcaagttgcgagatttacctccaacccacagtgctctctatgcgccagcaattgagccaatccttcaaaccggaatcgaaggattggctttgtctgccttgacattccttgagattatttgatgacatgcagcacattacgccggtgaagcaaaaagtacatggcatttagcatgagcagagagaagaatttaggatattatatgttcatattttgtcccagggccttctagtgtgattcgtagaattcatctttcctattccgtatatgcctgataacacatcaaaacacatcagaactagagtaatacccatttaataatgctgttcagcgtttcaattcttaatatacatcggaagaattttttttatattaatctccagccttatacttcgtccccacaccgctgggaagctctattagctataatcctaagccagccgcttgatatgaactgcccaatacgttagacttcaataccgttagcactagaatcctgacagaagctgacgagttgagctaaagaccacagagatggtaaagcttagtgttctgcattaatagaaaaaggccccatcggcagagcacagacagagcacagacaaagacagggcgaacggagaagcgggttaacgaaaaagggagaagtcatagggcgacgaggactttatagaaataggcacggggaaggctatgggcgctacaccgcatcgtgcaattcaccgtcaccagagactacgtagcattcactcattggagttggcagtaaggcagcccttaagcatcaaaagggcacgcgctcccttgaaaggcactaactaagtggagtatttctagacagtttcggcccctggactagatagtatagacatatgctgagctacaacaataccccgtacactctaaagattgatggctgtatcacagcagggcacgagagcttgctgtagaacaataacatctgagcgtagccttttgccacatcgaccgtcctgcagctgccaggtacgcgggaggagtgtcttccgaccagtccgaccacggcgctaactgcgcccaggcaccagctaaacacctcccctgctcaggactgattttatatgttgtacggagtatagtctagaggagtcatagtaacgtggcgaagagatgggtctaagaaacaagaaacgagaaacattcttcgtacaagttaggagggcaatcttccgccatgtcatgagtccatcgccaaaagggggttagtgtgaccctcccgcttccgtcatcgtctctccagcctccactcccccatctaccatctcatctacccttatctcctccttccttcccatcttcaagtcattctcttctttgcatccaacatctacagctttcttttctcatcttgaatgatgaagtcattcactatcctagcagcttcggcgttgctgggcagtgctgccgccgaggttcacaagctcaagctcaacaaggtccctctgtcggagcaactggtacgatcatcccatcatccctattgccttcacaataccctggaagctgatcgattgataggacacacacaacatcgatgctcatatgcacaacttgggccagaagtacatgggaattcgtcccgagaagcaccaggacctgttccatgacacttccctgaaccctgccagtggccacaacgtgctggttgacaacttcctgaatgctcagtgtacgatagtaccaccaaaatttaggtcctgaatgatgacgctgacctttccagacttctccgagatcacgatcggtactcctccccagaccttcaaggttgtgcttgacaccggtagctccaacctgtgggtcccttcttcgcagtgcagctctatcgcctgcttccttcatagcaagtatgactcgtcttcttcgagcacctatcagaagaatggctccgagttcgagattcgctatggatctggcagcctgagcggcttcgtgtctaaggacaccctccagattggtgacttgaagatcgagggacaggacttcgccgaagctaccaatgagcctggtctggcttttgccttcggtcgctttgatggtattcttggcctcggctatgataccatttccgtcaacaagatggtccctcccttctaccacatgatcaaccagaagctggttgatgagcctgtgtttgctttctaccttggcgatgccgacaaggatggtgacaactccgaggctacttttggtggtatcgacgagagccactacactggcgagctgatcaagatccctcttcgtcgcaaggcgtactgggaggtcgagctcaactccattgcccttggcgataacgttgctgaacttgagaacaccggtgtcattctggacactggtacctctctcattgccctgccctccaccatggccgagcttctgtaagttggattctcgcttgccttcgtaatgtaatctgtttgctgacctattccacaggaacaaggagatcggtgccaccaagggctttactggtcagtacagtgtcgagtgcgacaagcgggactcgttgcccgacctcaccttcactctgggcggccacaagttcactattggcccccacgactacatcctggaggtccagggctcctgcatcagcagcttcatgggcatggacttccccgagcctgtgggtccccttgctattttgggcgatgccttcctgcgccgctggtacagtgtctatgatgtcggtaacaacgccgtcggtctggccaaggccaaataaatgcccgacggccggtgagctgtgaatatcagagaaccaggtgacacaaggagattgcttcgtatatacatgtcgcttctgagttgaacgtatggtttcatagcgcacttcattcgcctattgctaagtagcatgttgattagggtttttgtttttgatcgctggcacagccccttcgttaaggcctgtcgctcattggtactgcaaatggatatctttattggttaagatctacttattgcatctcattcttctatcgaagagtcttccctcgtagtggccttggttcagctggatccctcgataaattcctagatgtaagaacttgagttggcaattggttggagctaatgctggttaagcatcaatccacagtcaaatttctaatacgtacagtcggagaaaattagtagtatgtcactacgacttagaatatgaataaaaatatgtcgagggctatttgatcaagccatcatatcataccattcagaaaaataagatacttggactaaagtagatcgcgcgccaattaatacgaggaggtaccggctttcaagtactggtatgacataagcggaagtagctctcaacctggatcgagtgagtccccgcacaacttcaatgagcttcccttttctttgatcgaagtccacattcctccttcaatcttctccgccctttcaaattcaagcgacttaattcgcctggtgtgtgatttgcctcggacctccgcgccaggttgtgctaggcgcacggttttcttttcccatccgcgcttggagtggcgattctcattgcgctgccgaaaccaccattcacatctatttattcctctgatcgatcttggaatactgagtcataggctggaataccatcatcggaacccgatattatccagctcaacacgcgttgcgtgtcggtgatggcgtcgtagccggaaccgcacgcgatcactccattcggcccacacgtccttgacgcgcgctgtcaacataacaaggacacagaatacattttggggaactgagcattagtacattacatcgcctgggggcgaacgaagagcaacgatgcttctccgtctgcccaccggcctacattacccgatcaccgtgacgtcgctgctcaaacagcctggcgacacgattgagaaggatggggctttgttttggtatacttaccagactaccgtcaccgagggtgatggactgggcaacaacatcgaggtgaaacgtaggttcccggctagatttgaatcgactattgatggagagatcgttaaatggcaaatccaaaagggagacgttattgatgaaccgtgagtataccgacccttgtcttttgctatccttttctaatttgttgctagggtcaatgttgtcgaaatcgatgagccttgcgcgcacgagattcagtttggaggactttgtgccgagtgcgggaaggacatgactgagtatgtataagcctttcagcgggaattgagcttttctaacctgtctcgtgaacagatctacgtacaataccgaaatcacagattccatgcgcgctccaatctccatggctcatgataacctcacacttacggtcagcaaaggggaagcagctcgagtcgaagaagatgcgaaacgccggttacttgcatcgaggcgtttgaccttggtggtggatcttgatcaaactattatccatgccactgttgatccgacagtgggggaatggagagaagataagcaaaatccgaaccacgaagctgtgcgggatgtgcgacaatttcaattgatcgacgatggacctgggatgcgtggatgctggtattacatcaagctgcggccaggactagaggagttcctgcaaaatgtggctgagatttatgagctgcacatctacactatgggtactcgtgcttatgcccaacatattgttgatatcattgatcccacccgcaagctcttcggagatcgaattcttagtcgagacgagagcggaagtttgacggttaaggacctgcaacggctgttcccagtggacacaaagatggtggtaatcattgatgatcgtggtgatatctggcggtggagtcccaatcttatcaaggtctcaccttatgactttttcgtcggaattggtgatatcaattctagtttcctcccaaagaaggaagatattggagcgaacaagcctcagatcgaagcgaaggcaccggagcagaccaatgaacaccacgtcaatggcaaaacgcaagaaggggcccaggtatcagcattagaacagctggtgaccatgggtggtggagacagcccaaggctcctccaggaacagaccgatgcacaagaagagacaatattgcatcaggtggaggatcgacctttgttacagaagcaaaaggaattggaggcagaggataatcttgctgaaaccaatgaagtatcgtctagcattgaagaaacccacgaatctgcgaaaccccgacatcacctactcgaggaccatgaccaagaactcttccagctgcaaaaccgactcgaacaagtacattctcaattctatgatgaatatgacaagaggcggactctcgcccttgggggtcgggtggctgctctagggggtcgggtagctgctttaaggggagagaaggtttactcaagagacaaagacgtggatcttaaattggtccccgatgtcaaagacatcatgccgcagatcaaacggcggatccttggaggggtggtgcttgtattttcaggtgtccttcctctgggcatagacttccagaatgcagatatctcgctatgggcgaagagctttggtgtgacgatctcgtcaagggtgaatgcccgcacaactcatctcgtggctggccgcaatcgcaccgctaaggtgagagaagctactcgctatcccaacatcaagatcgtgacgacacaatggcttgtcgacgcgttggttcagtggagacatgttgacgaagaaccttatctcctcccacttcacccagacgaccgaggcgaacccctgactccgagtgagctcgagcttgaaacatccatgctctcgtccacagacgaggatgtgacagggccccaatggacacaagaagatgacgctgaagacatcttcaagtcattcggcttggacgacacatcgccgatcgggtatgatgcggacgagcaagccgctgtacacgatgaactcaaggactttttgggcagcgatgacgaaagtgaaagtgacaacgaatccttattagacgaaccatccataggaggcaagaagcgtaaacgcaacgaagacactgaaagcggcaccgacgaagaagagtctggagacgacgacggagatgaccatgacaaacaaggctcccggctctcccaacgcatcaaacgctcctatgagcgcaacaccaagctgcgagaaattacatcggctcctgccaccggtagtgaccaggcttccccagaccgcccccaaacatcggctgtggagggggagtctgactctgagacaccgggaactagcagcgctcccaaggccgactatcccgacccagatgacgatgacgacgagctggaacgggagatgcttgctgcatttgagggcggagggtatgaccctcatgcagaggcagatcctgcagctgaggacggatagagcactcggttgattttgtgcattcgtttcggattctctttcttcttgtcataaccggagggtgtgcggttgcaatgcgctcttggcatagcgacggcgtttattaggtctatttgactttgcgtgtcttcttatctgtagttctcgggaatttgtgtatctgaggatcgatgtacaattcagttcaatatactgggattatgtctgcactatggagtactaaaacgatatgtctatatatgtagattgaaatatctcgtttgtatcctttcagaaccaaatcttatgcacaccaaaaagaaccaatgctatgtcgcttccattcaacgccacagatgcaaaaaggtggtatcacaacaaaaacaaaaaccaatgaaatcaatcataaacatcccgattcacctgccacgacataatcatcatccaaagatagaaaatcgtgttcacaagctcgagcgcaaaggcagttctccagcaattgcctataaagtcagtatacaaaacatacaaaagagggcatagaagagaactcacaaatagtactctgcgtcaaccaagccaaggtgttgatattattcccccaagccttattgttcgtcacgtagatttggcaattatcattcacattcccgacaacgccatacagctgcagcgaagtctcaatcagacccgtcagccacagcacaaagagaataaagctgccgatgatgataatgcccggtaagaggaagtggcgcgctgcaaggatcataattaggaatatgaagcacacgccgagtgcgctgctgacgaccatgtaagggaagagcctggagatgttagtatagatcctgtattgactatgacatgtgggaagaatgtggggggtaggttatgagtatgcacgtagccacacggataatggataatatagagataaatatagatcacttaccatggcgtcccaagatgcatttgtgattgcacggtcatgaaccacgagaatatccccagacatgtcgctgcgcacgatagcacaaccataatccagatgttgagttggagttcgggccagtggtagcggcggcgcatttcgcgacgcctgcggactgccattggattgcttgtgggatgtagatagagggtttgaggtgtgtgttggattgcgatgggtgatggagctcgactgcgattgtggagtggagtggagtgtgtgctttatactggtgctgttgtatactgcccgacgcaggcttggatgccctatattttgttgcgggcttgggatcggatggccagatcgggagtcaagtgagtcaagtgaatcgagtctgaagggattggtagaatcctattgtttcaggtgaggcgcggtgactgggacaacgcattgggcgcccttgagcgctcgaggccctggggattttggagtcggtgcggtgtggatatatttacaatcgtgcatgaatttctaaacgaaagaaaaggccaagatatacagagtaaagaagaaaaattaagcaaaagaaaacaaaatggccggggagggggaaatttaggaaaatggggtggcaggggatttagtgtcgttccctcggactggcagcaattctttgatctattttggactgaatcctctaaatctcaattaatatcctcttttaatccctttatcaaatcgtctttatagaagagtgtcacccaatgcactacgcaccagcgaacaccctgctcgaatggtctccgacgcacccttggactccaggctggggttcacctcgaccaagtccatcgcaatcagattcccggtctcatgcacagcctcacagatgaagtctccctcacgcaacgtcagcccaccacggactggtgtaccggtactaggagcccactgcggatccaacgcatcgacatcgaaggacaagtgaatgggagtgtcgttaccgatgtgagcgagagccatttcgacaacgcgaccgatgccatgactagcggaggaagaggtcagcacgaagatcaccaccacagcccagggaaaacaaaacagaaaacataccggtcgatatcgtgcatactgaatgccttgataccattctcccgcaagagcttcttctccccgcggtcgacatcgcgcaacccgatatagacgagcttctgcgtgctcacgatgtgctcgtcctgcatccagccaaagatatccttcttgtcctcccgggccagccgagtcaggaacgccatcggcatcccgtggatgtttccgctttcgctcgtttcgggaatgttgatatcggcgtgggcgtcgacccagatgacggccatttcgcggcccagtcgctcgcggattgcctttgctgtgccggagacggtgccgatggcgatggagtggtcgccgccgagagtgagtacgaatttcccgtccttggcgtagtcgtagacctgtgagctgagcttctcggtgacggcgctgacggcgcgtggcttcttcatgcctcggtggtcggggtcttcggcggggatgtcattttcgtagtagtggactttgctgtcgtggtggacttcgtagtcgaggtcttcgctgagttgggttaggaggcctgattcgatgagggccatcggtgctgcttcgacgcccttcttgcactgttggggtttagtatgagttcatgagctatagctgtagttccaccgggtgtcttacctggccgccattgaaaccaacggcaacaacgccgagctggttcgggtgtgagaggaacctcgaggtaatggttgaaggttgtgtcattttggagaaagcagggagattggaagaggagtcaagaagaaagagagctgttcaggtgttgcgatcttgaagatctcgataagaattaaaatgtgggggctctcgataagaatatctgaagaatcgtcaggatagtcaggctgatgtcgatttgtgaaagaaacagaggataactcttcctttaaatatctcggacttgtcttacaacgtttctcacatggccccgacttcaaccgggtcggtgtttcattccttgcgcgatgcccgcgaagtcgctaaaaactgcttttagcgatcacagcgactccgccggatctccatcacttccgttaagtacaggttgaggagagcgcacccctttagggccattcggtgtcccacaagcctgggtttgacctcttacagcgagagataggccggcaattctgtcatttcatttccgggctttgatccaagcgcgtggggtggtatcggaggtccgggagcctacagggaagagaataatcgcaaggccaccgtctcggccacggtcatgagggtatcattgatgccatagaatacattccatactatactatacaagctatctcaggatcaactctcggagaacctcttctgccttgagtgcctccacccggcctttctcaccattgcgcatcatttgccccacaaaccaacccagtttacccagctgcttcttgctacggatctgctcgaccatctgcgggttcagcgcaatgaccgactccgccagagctaggtactcctcccgcgacaacggccgcagtaggagattctcctcctccagtagttgcggcactggccgttggtccccgtcaaagatggtggtcagcactagtttggctgtcgggccggtgatgagtttccgctgcagatggtcgatgagatgcgccaaggaccgggctgggacggtctccgcgtcccatgcctgatctgccttagccaggagagcgcctagctcgtgcaagacccagttgctcgccactcgcgtgagaccggcgcgcgttttgtcgtcttgatctacttgaagagtgcggaggatatccaccacatcgtggtagtactcgagacgggctccgttgtccagctcgatgagtggtttggcatcttcgattggcagattaaactcggatccaacgagcagtgtaagaacagtgtctggtgctgtcggaatagacgctcggagactagagagcaggtcctctccaatgaccagtggtggaatatcaggatcaggcatgtagcggtagtcgaccgagccctctttgccgcgaagtctgcgagtttccgtgctgccgatcgtccacccacgtgtctctccttctacaacaccgccactctcgagcacctcgatctgtcgattcttctcggcaatgatggcatcctctaccgccttgaagctgctgaggttcttaatttcggtacgctgacccagcccgctgattccatcgtactgatattgtcccggtgcttcgcctcggcgtcggaccgagacgttgacatctgcgcggagaccgcccatttccatgcccgtagtcacggcaccacaagatagtagaatggcttgcagcttccgcacgcatgctgcggccgttgcaggagtgtggatttgtggcatggtgatgatttcgaccagaggatgggacacacggttgaagtcgagaagttgtcttgagccccggtattcctgggatttggctgtgtcttgctccaactggagttgcttgatgtcaatacgaatccgttcaccgtcctccggggcgattccatcgtaatcgaataggtcaacgtagccatttcgggcgaatggttctagagcacgtaagtatattccgcgggttgaaggacaataacttaccatagtattgtgtgatttgataccccgccggctgatcctggtagaagtaatgtttccgatcaaaccgactcactcgctgtatctcacaattcagtgcaatggcagcgcggagagctggtaagagagtcgcgatttggaatgcctgtctcagatcagccctgtcgcgattccacagcattgtacacgataacactaaccggctggctacccgggaaggccagatcgaacaacgcaacgttggaattggggatatcgcttatcgaagttgccgcccctattcaattgatgagacgccgactcgtagtctccgaggtaaaaggcgtactcacgagaaaacaatttggtctctgtatccaattgcgcgtggatctccacgcccactgtcagttcccattcttccctcgatgcctcctctgtttccttgcgttgtcttttgtgtgatctgagcgctttggcttcctccttgagttgtttgcggaggggaacgcgatcggcggaggctggcggttggagatagcgggttggcgcggaggagaattgggctttagtggatgaaagggctgaccgagtcaagcgacggacgcacagagagcggagcgtaccgccaccaatacatgaccgaagcatagagatattggactcgtgttgagtgttgagtcttgaaagacgtgaatttgcgggagaagctcgggacttggcgatctgcagatcattggacttcagtctaaagagacatattcttttaaacaaaccctttcgaatatcatttttgtacacttacaatgctgtgagaaaaagaggatattattataaagttcttttaacactagcagagttgtattcagtcaaaaattcgaggtgttatacaccttattcacccgcggagtgtagcaacgctcttgatttcgtataaaatcaagtattaatatgttataagacagtctaaacatcataaagagagaaaatagacctttcctaccaagacagcgaaacctgatacttcttctagtgctctatagtgtcagtcttaagacttcaatcccgcctgacaatccatgcatgctcaggatcgtatgatgaagctcggcagatagctgaagtcaaaagaagaacagggtgctaatataatacttgttgcctgttaagtgagcctgttctaggttggatttgatctctcgaactatataaccttctcggaggagcagcgattggctcagtcgccacagtaaatgttttccatcggctcgaaatgcggggattaagtctccacaccagctagaaagaggcattggaacgaaatatcagaagtagaagactatcccaagggatagaaatagctatacgcaatcagtgacataattgatataaccttctacgtcgaaccgtggacgatagctgtctctcagccatgtacctgttgaaaagatacaaatcgactgcatcgagtcgaccgctcttaaattctagctattctatttctactatataaaacatatcgatagagactaatgaatttccatctgccatgttattgtagaagatacacacagcaacaattcctagccaatcgccctcaaggcagctagaacagaatcaaaaacagtacgaatatcaaaaagcttccgtttactcaagtcgagggaataaaaacgccagacaccctccagttccacactggatcgcaattgaaaggctccaaaaatcccacattcaacgccagactgacagacctgctgcccggattacctccacataaaaaaagtcgttatcacataacatcagcacgtgttaaactcacacattgatcaaatcatcaaatgtatcctccgccgagaacgaataagacccctcagagacgagcgaagcctccgactcccggcgcatctgctgctcaaacgcctcagccgccgccgccgcagcgggctcaagctgtagaggatcatcaaagccaaaagacatggccgtcggcgccggcgcagacacagccaccgccgccgtagccggagcttgcgtgtgttcgaggggagaaactgagacagaggggttatctattctggcgggcgattccggtagccccgcaggcgcagcgccatctttatcggtaatcttcttgaccatctgggcgaggtgaagtttaatgggctcgtccccacactgagcatgtttcagcacctcgttcttcagccccaggatctccgagcgcagccgggcaatctccgcaaccagctgctccttcttctcggactgttccttgaagttgaattccagctgctgggtgtgttccttctttttctggcgacacttgcttgcagcgagacggttgcgctcgaggaacttggcccgcttggcgcgttcgtgtggggcttcgtcgaagtccgggctgaggctggcggtggtcttgtattcgcgtaggcgccggtgtttgctcacgctttccatcatgtctagcgtgaggtcccggccttggtcatcgtatgggggcggggttggctggccattccggacctgggcgtttttgaggtcccgctcgagtgccgaatgggcaaatgctgccgagtcggccttatcccacccggtggccattggtgaaactggactcagaccccagagttggtcgtcgtctggaataggaagacctaggaaatcgcctgagaaggagcttgtgaatggtgatggatcgatgagattggttgcaaggccaggtaaccctgatggtagccctgatggcattgcagatttgaggttagacatgtcaaggcaaggaagctttagagcgaaagttatgttccttctaaaacatggaagggagagaaagcaagagagcacactaaggaagctaagacaggctctcttgccctaataaccctaaacagtcaaagtctgtctttcccttggaagcaggaatgtggacggtgcctgaagaatcgcagagagtccaggtgcagtcgacctggttggagccacggtcggacaagacttcctgcggtccagaagatccgagcgaatggcaccggatgagatgatattcgggtgtcaccaaagaaaaagaaaggtagaagaggaatgtcaaaggataaaggaatgtatgaatgtatttttatcgcggtcgtgccctggcctactaggtaaaccccttcaaccctaggatgcctatcaaaacataaaacaacaaaaacaaggtaagagatagaagtgaagaaaagaacggtatccaacgggattcaaagccggccagcgaaaaacagggttggggaatatcccaacctcagtatacaagtaacaagttcaactcttttagaaatccaatcagagaaacttctggtgtctcatatgaaacatccacaacctggaatctctttgtccgattattccctgcccaccacgtatcgttctttcgtccagtgttgcagctgtcggtggataaagtgccaattattgagcaatagccccgccacgcgttgttcctcaatctccctttccactgctgagattccttcgtcgttggcttgccccctggcccctaggaggagcggtccaaacacccgcgccaactcgtggaagttgggactcgccactggatcacggagctccatcccggggtcctgggcgtcggtctccacattcaccaacaaggaaagaagcccaaataccgcacagataaggtcgagctgcatctcaggcgcaagggcgatgagcgcaagacagataagctgcactcgggcggcggtcgttgggcttgcctcagagatacaatctggcacacggagcagatgggatggattgggggtccagtgatagtacatcgccctcaggattcggtagagccggacactcccgaggatcccgtttggaagccccgccagcacggcccttaacgcccaggcgacactcaggacgggcgctgagtcctcacggagctggggcatggcaactacacgcatcgtgagggaaatcttagattcatctttctctgcctctagcacctggctagcaaagtgctcatacaagcgaatggcgactttcagatcgccgggctggacgaagatctcgggagtgttaagacctgcaggaaccgagtcagttcagtcgtgacgtagaagaagcagccaccaaccatatttgtgcagaaacatcagcgttgccacaatgtatgcggggagctgcacgggacagggggctaattccgtcagcataagatagccatgtcctccaagacgggccaaagtctgaatcgatcttccttgcaacgaagtcatcgtactggggcgacgaatattcgccaatgttttcattcgtcgcagtttaggagctggtaccaagggagttgtatcgacatccaaactggatcgcaccttgcgaactctgcccaacaatccaaatccacgacgactcgtggcttgttcgggattgcgctctgatgctataatctagtcagtggcaacccaggcccaaacaaagacaaaacgtacgtgggcttggagtatcattaaatggaatggcaagcgagatcccaaactgagctgccatcttgttgtaggccgcgatagccttgggcgagtcaagtgtgctactccaactaattcgacttgtttggctgttggccgaacttccccccggacgttcgatgaccgattcaattgtgtcgaaatcagtctcggcgataggctccagcgtcgcttcagaagccctggatgattcctcgcggctcgtacctgcactatgcctcgaactcgattttccttgtttaacgtcggtcgccttcccatctgagaacgggtccgaaccctcgtgagtatgctttttggtattgctgctactatcgtcagggtaatacagcatcagtcccggccatccccattcccccaaaggcccctgagttggcatcccgaggtgctgggcaggggtttgggagacagtagcctcggtttgactggactcctgagaatgagtcgtttgagtgctgaccttccgcccctctttcgggttatcgaacctgacagacttgccagctgtggatgattccccggcagcagtatcttgcccaacggggttggaagtcaacggtttggagctcgacctccctttgcgggcaccctcctgtgcagcttcaagctgtgtgtccgtgatggggtcatcttcctgggatagactgctgcgcaagcgagtaaccattctcttcagacgcttggtgccattcttggaccgagtaagttcgcccgtatcttgggtgtgctgaacagtcgactcagtttcggcattgtcaacgggggttgctacagccgagctaggtgccttgttcgcatcgctgggtcctgcttctgctgtcgggtcctcatcgcattgtatctcattcgaggcggcttcgggctgatgcttcaatgggtcttcctcagacgttggacgtcgtcgtggccagacagtacgagatgcagcagggttagatggctcagtcttggaccggaatacagttttgagacgccgcatgattatatttggataatgtatacgagaggaagagatggtgatgaagtagagctagaacaggggcgccgggttgtgacttggacaaggtcctgccctcgaggaaggagctgagatacatgaggaagtcacgttctaccttctatagtcctggaagaacaataattaagataatgcttaagcatcattgacattcaaatcttccgagtctattctgtgccagtgctcgtaaaaaacaaaagagagcaccggttttggaaaccatgtcattacctctgtacattcgtaaagcccaaaattaaaaaaaaataggaatagtcatgacctgggtccatatgctctcgggcatttcatatgttatcttcgtctttcgaggtctcgaagagccacaggacagatcaaaacgccggaaccatgcaaaactgaatatgtatggggaaattattttctcgaactcgatcatgcttcctcattctctccctcgagaagaatgtagtgcaggatatcactcagagtcaaaacgcccttgagcttgaagtgctcatccacgacgacgagacggtgcactcgagatttgcggatagtatcaaagatagtatccagtccatcattcaatgaacatgtgtagatacccgggaaaccctgcgcagaacatcagtatcagaacgatatcactaggaacggaggttcatttaccggcgaacgtttcttcaatgcttccccaaccgtgagactcaagtcatcgtagaaaccacccttgatcaaagtaatgacatcgaccgactcgaatacattatacaccacaccttccgagttcacgatcggtacactggatatgctgcgctcgaccaaaatatggatgacatcaataaccggggtatccatcgaagccgtggcgacgttatcatacgatccaagcaagagctcgcccagcggacgacggagctgctgcgtatcggggacattgacggcaacgaatttcaagatacggtattgcgtgatgacgctgagaacgtggggccgctcggtctggctatcgctggtgacgagggggatacggcgggcgcgcgattccaacatgcgccgacaggcatcgtagagagggcgctcggggtcgatggagacggtctctggcggcgcgacgcctagcgctttttcaacctctgtatattcccgttagctgcggggtgtacctgcagagatggggcgacacgatccaacgcacctcgcaaactgtccaggcggaattgatcgatctgatccagcgccgcggggttttggaaatagtattggatgacattgatatagtcggaagtggtcagaagacctgcgaatttggacgctttggagtcccacaacggagctgaaacgatgcctgtacctcccgatttccgggctcacgatcagcttgagttcaataattttgtagagaaggagggggaatcgcgacaaacataccgttttgaatcagaatgttcagactctccttgacggaaagcgacgtatcgaagatgatgagtcggaagctgagcggcaggacatcgtaggagtttcgggccttaaggaaatcgcgaatggcacgctattttctgcgttagtcaagatctggatattcccaggtgatctaatctggtgactggtgaacccatgccgaaacacgttcacaatgtccgatccccatgtccaacgtcaggtataaagaggggttgtctccccttgaaaaagcaaaaacggacaagacttacaaggccctgtcgctcttcccgatcgatcgctcgctcggaggccattggggggcgtaggtacgaggatgggctgcacgaaaggcgcgtgaccagaggaaggtcccgagtcgagggtcttccgcctttcgatatgtggggggttgagggatcctacgcaacccagattgaaatttattcgagagattaaaggagattaatggaatactttccgattttcttccctattttcagagattatcacattcagttaattatttcctgcgaatgagggggctgcaagtacgcggactatacgggaataccaaatgatccttgttcaacgatgtaagttgtatacgacatggataacctggcgacaactgacacctagttcctcaggcatatccccagattccgtctacgaaaatcttccatctggactaggacgtggggcagccaccgacttccggatacagagcacaatgtccgagaacatttcctcatcagggccaaactcatgctgctcataaccctccagcattgctctgactcgcggagaatcaggatcagtcctaatgaaaatattagcagactgaacagagggtagaacatgacctgacactcacagcccccgaacaagtccatcgttgtcccccactcgaccccaaataataaccgcaggccgagcaatgtccgtaataatctccttgacaggcacattcggtgctatcgagagtatgatcgagtgctcgtccacctcgagccaaccacgcggatcttcaattacctcgatgccggcctcgtccagaatcttcgtgtctacctcggtgtagtccgggtcctgtgcgtagcatacgactttctctttgttgtctctttcttttagccactccataatggtaacgaagagcgcatgctgagacgcagatcgccacccattcctggtatacagactgccatccgcattgaaacattggaaggacatcgcgcccagagcgaaaccgacgaccttgtcaatttcatgattctttgcagaagataacaggattgtcttgagtttttcgcaggctagactctccttccattcctcggccttgtcttggaatatctttgtgaccacttcacggtccaggggaccacgccgcgggatgattttctcggtcttactatcccattcgtgtgtccgatgcatgacactgactgagcaaggctcccaatgcgacaacgggtaatctcttcggttgatctcgttcctgagagatgctcgacaccggtaagaaaggaccagttccttgctggatgatgttagttctcgccataatgtgaggctattagacatgtactcaccacacaaattccaatgccagatcgtcctcccaccattgccgaacctttcccgtctcgacgtcgcactcaacaaccgcgccggttatgtctttggtaagtatcttatcgccttcgactgggtctcgcttgatgtgatcccacatatcttgaatgatctctttggtgaaaaatggcaccccggatgcgtagagtctatcgataattgcctttgcttcctccagggttggcacctccccaggttcaaccaagtaacaatgtgtgagtttgtagtcaagatctaaccgcgagattttttctccatcgacaggctccagattgtttacgtcgctcatgttggcgatctggatagaataggtttgagtatgaacaggaaaaggaaaaggaaaaaaagggaataatttattttggggccgtatgtatctatatacgagcattgctattgcggccggcgcgtaactgcgcattcatcatgcacctacatatcacatgagcggggtacaatcaatggtaatcataatatctactgatagctgagtggagagaaagcggctataggacgaaagaaatgatatgtttcgatactcccaacctgcctaagatatccaaagaggcccctatcccgacctcatggctgtgacaacatccttccggataaaaaccatagcacccctgaactttccgtcagacacgagtttcggatcgagtctatgatcctcgtactcctccatcattttcgtgatgcggggggtcgagtcagggtcaatcctagcgagcattcatgttagctttgggatcaaatctcatagcacatattagaaagtccaattaatcactcacacagtgcccttcgtttgtccaaagcgaagccagatcaccatggcaggtctagcgatatccacgatgatacttttgacaggtatgttgggtgctatggacagcacaatcgaccggtcatcaaccttgagaaagccatccggatcgtcaaccacctggatgccgacaccgttgaggacttccctatcgacaagtgtgtactccggatcctgcacgtagcaagagagctccttctcacccggccgcttctttctcagccagtcctttgcggtaagcagcaacgcgtgctggaaggcagagttgggtctgcctagccgggacaggctaccgcaagcaatcccgacgatgttgttgattttgtcagctctggttgttgacaaaagcacttcaagagtcctgtgggcctcacttgtttcccaggcccgtctctccttctcgaaggtaacacccgcatgcttgctactccatatttcttcctttgtaccgaacggatatacctcatgcgtcagtcgcaggggaatgagctccgaaattggaatgtcaatgccatccggatatctcattatgtccgctatgagccttcctgcatgattgtagtcgatggcaaggtccaagctagatgtgtcagctctcattgaaacaaatctgccagtagctaaatcaagcgtgagttgagtaacttactagatatattcccgttcaacgggatttgcgaaggttgtcgagaagaaatgatgtcccaagttcactgtgccctcgaaaacagcgccggtgaggcccctcacggtgactttgtctcccatggtacgtcggctcttcagctgctccccgagatcttggagcgcctttttggtgaaaattggccggccggcttcgtaccattgattgacaaagtctatcgcctgcttctttgtcatcgtcagctgttgacgagtcgaagtgttcgatgagtctgtgtccggctggggtttccagtgcaaagactctgagcgcactgcagtcatgatgataggagtcgaagtcttgcagaactgagaagctgggttgaatatcaagaatcttctgagggttgtagcttcatattaatacatcttggaggacattgctcaaaaagcctacgctgcgaacatgtagtagaagacagtataccacatcttctaccacattcgcgtgacacgttaacatccactaggcgagcacagtctgtgtccaattgtttcagctacttctgtttcctgtgttggttggacgatagattgtgggatatgacttgaattgaaaatcggtagaagggagaaagcgctctcagacaagaaacagaacagatatagccccatttaagccataaatagagatcatggttcttattgtggcgtagtgttagtacgctatattattttccacaagcgcttaatccgaggacctgcaagaaaatagaagtcagacatgactcaaagttcttaaccatctgaatattccccatggtagcctgacagacaacattttgccctgtaccaggaggattagacaactgggaatctcaggagtcggcgcgtaccacccgtcatgcgcccaggaatatagtatagtacaagagatatagaaggagtcagcggatgcgaatgaagaatgtgggaaagagccatccatcgcttttttatcttatattaatcaaagccatatatattatatacatggccattcactgcaaaggcaacatgaactatctgacaacgtgttgacatgcaagaactattgtactataggcttcggcggactttcaattaatctgttagatgatgtatattaaattttcattgaaagaagttgtttgtgccgagagaaggaattagggcgaagagtgacaatcaatagtaaccagtaaccatctacctatttataggcctgcaggggtatgaatcccgaagtagcaggctagcgacgtacgagaacaagagctgaaggaaggcaaccgtgctgttggtagagcaaagcgccaggaaaccgaatgaaatcatggctatcatatgatatggctctaaagataaatatgagaggcaaaaaacccccaaacccaaccggtaacgccgtcgcacccatgcaaggtatcatcgcaaagcacattttgtccaaattctagaccagccagaacctgatctcttgggaggtaaatacatgagagaactgtaagagacgcgaagctcgacgaatctcaacgagaactgaatatccgtagccgggcctagaggtgcccgtgtaacttgaatcggtagatgcaggtgtggtttgcaccccaatttgaagtcactcggaaaacaaccttgtccacacggatggttgacacgtcgacaatggtgttcagcttgaatgcttgcgcgtagtctgggccgtggaggtcgtattccactttcccgatgcggtagaagttggggccgagaattgggtcatccgagtaagcgctagggggctcaaaggggttgctccgacgcaatagatccattaccagcccgtgaagtgagccaattccagggattaggaatcctccaagtcccgtttcacgggacgaaggggcctgggtgaacggtggcggttgtgacactgtggcatctccgaagactttcaggaagccaacacggccaggtttagcctcgggtgttggtttggctttgattggtattttgtgggggttcactttgaagcgagcccacacctcgattgttcgaggtgccgcctctggttcgagagaagcgcccacgggaatgtgctcaactaccaactcttctgccacgatatcgcggccgagaagtacagatagttgagtcgttccattgcgaggagcactgcaccagcagtcgcctacctcttcccacgtggtaagggcagacatgggggattgtggtgctcgaatggagcgcctggcaacaaacgagctcgcccagaggagtgctcgtaatgatgcgctctgtttgggacccaaagtcggtgaagttttggctgggtcaatcattgcccccaatgccaccgagaggaaatttaccttatagattggcttccgatggaggtttgcatctgtgggcgctgaatcatgaacgttggaaagcgactgttctgatcgaacagaattgatctcattcgacaatgatgacatctgaacgtccaattttgatacctgactccgaaggctatggaaaacttccggtttagatatgtttatgtttgaagaggaatcccaatccagagtaccgtggtccagatattcacgaaactttgcggcgatgaggggcacgaagatgaagctcagaaacaaaagcagatagaacgcagcccgaatccaattttggtagcggccctccattgctgcttcaaatgtctgcgtccagctttttcgttgtgactcgctggggggttcattgcgactctctggctcccgacgactctctggctcccgacgactctctggctcccgacgtcggggtcgcgctgctcctagccatcgacgcaaaacgctttccttggggatgtcgggctcgaaatcttgatatatcgccggttcaaactcggcgtcttcctcatcctcctcgagaacattagccaggccagaaactcttcgaggaggcgccgtgatgttgcgtccatgtttgcttggccgcgttctttgtaggtcatcttcgttaatatcacgttctagattccaagacgcgacagaaacattatcaacggagctgtggcggaatggcgtgctgctgcccgaaggattattaatacgaggagatcccatccgttgaagcggcgatggataaagcggagagtttgacaagtgtcgttgcaatgggggttgagcgtcaggactagagtccgtagagatcgaatgtggaactggaggcgaaggagtcttatcggagtgttcatctactgcattatgcagcgactgctgaagctgggtttggtcgggggttggctcacgctttgactggcgtgcttgaacgccttgtttcttcttcgtagcggctgttcgctttcgagcagtctcaagacgggcatcgactaccccagctatctgatctatccccatgttgggtcggatcgacatgcgctgaggtaatgctgtggtagtagcagcgccataattgaatgatgcttgaactggaacactgggcaaaacaggcccttgcacaaggtcgagtattgactcaaattcgggttcctgatgtggtcgttgaggagttgcgccagcccggcgtgtagcacgtttgggcggcatctgtgttgttaacccctagggttgattccaaagattatactttgttcttgttttgtatctatttgagatatcagctttggactggacaggtaaagctaaagaacccagacaatgggatggccaatgtatcaattgaagccttgcagatactaaatattgattgaaacacaatatccacacattcatgcacaagacataatgcgacacgaactggaaatgatggcacgcgaatggaacatatgcaagtatggtggaccagggccattaccacaactacagagcaagaaaaagaagtgacaacaatctcagacttaccacagaacagattgaaaatgcgctctgacaggccgtgtgcagatgtccgaagcctgtagatcgcgaccccggagagacgcgcagacgcgacggtaacgtgacttgcagctgccagctatcagcatccgagggtgatgccactcaagaggtcgagaagtgttcgctttatttcaatgagagcgacaatttggtctgaattgccagggatccgatggataactcaggaggttgagtgaagtgaggaaaagtagacgagggaaaagggtggaggcctcttgaagatcactgaagaatctcaaatctcgactttttgagctgtaattcacatcgaactctgcatggaattacttgttctttatatttttgttgttctttatagaatacagtctcacttccattgtctttgttgttagatctctttgtcaacccttgcgcctcggactgctacgatcttgacactatttttgtttcatttccttacatccctgtttgaaggactttgttcatgttgtatatagaataactaacgtgatgctgctcctgattcgcccggtcgctactaagacatagattgaatactatacaatggacgcaaaaaggctgagctgaaaagaagatgagacccccgtccccccaagtatgcacccctaggaagagatcttacacgtctagcatgtccaggcagccatagtgccatctttacgtccctccacaaggtagccatctttaagacaaacccgctcaacggttgcagggagtggcccgtcgtcatcaagcccaacacctggaccacagtcccagtgcttgccatcggccttgtcatagaccttgaccacaccctccccggcagcggccacgatccgtttggagtcgaacatcatatcggtgatcggcttgtcataagcgtaagcgtcataaatagatcccatgcgtagatcccaaatctgtagataattagaaacaatgggtaagtaggaaagcaaaaactggagtgcgtacccgaatgctgcgatcaagactacccgtgaccagatgcacgtcgtcaaattgaagacatgtgaccggccccgtgtgtccgacgaggctccggtggacatggccactgcgcaaatcccagagacggaccatgccatctgctgtaccgcatgccagcgcggcgtcaaagcactgtactgcgccaataaagtcggccgaagcatcgggcgtgcgacccgatggtcgccagtcagtgtctcccatcatagatgacgatgcttgggcggccgcccacaaaacatccagagtttggacacagcggcctgtgactagatcccattgtctgagcgtcttgtctgcagaacccgagatgagggtgtcacccttgaaatgaagcgctgtcacctcatcgacgtgtgcctccagcgagaatacattgcagtcttcgaggttagaggtcggcggtgccgggaagttgtgttctgcctttccctcttcttggtcacgctcgtgcttgttgaggcgcccgtcccgagtcgtgggccgagcacggctcaggtcccacagcttgacagaggcatccatagaccccgtagcaacaatgttatcttcgacttgcaagcagcgaaccgaggcattgtgtccctccaagaaaccagagcatcggccgacattcatgtcccaaaccctcacggtatcatctagtgcagcactaaccatagtaccaaacggatagtcgaagtcaactgctgtgaccatgtcggtgtgcgcttctatttccttgatcaaagaccctggggcaaagtgttcatgtagaattggcatcgaccgtttccctaaatcagctgtcagttgtgattcgtgtatcagacagaaggattccatacgattacttcgatgtcgtagacttttcggtgaagatgaggggagcttctcgtaaatcgattctgacatgaacgaagcgtccatcgctggatctccggatgacacaatagaaccatcctggccgtctgaccgcggcgtcgctactggtgtgtcctgtgatacctcttctgggaaatcttccagcttattatcgagatcgatcactgttccattttaatcagttttctccgcataatctcgtttgtctcaaaacatcgacccacgttcttgctccaatcccgcttcgtccatttccaagccggccaatcgatcgagaacaatcgtgcggattttgtgcaagttggcgaccttgttatcgatttcgtggatctctgcgctgcacatgtttttccggattcccatcaactccaatttgcgactcagtgatttccgctggtcctttaacccggccgggccggcattcaagctgccgcctctctcggcgtccttgagaagcttccccttggagctccgccttcggtgtcgcttcttctcgggttcatcgggaacggaggcctggaagccttggaaaagggagtaggagctggtgtcttcaggaatgttggcaagaagatcatccgagaggaacgaaagggcacgggactggatctcggtagttgaaagctttgagcggacaaggtcggtcggtgttgtttgtgttagagagaacaccttgcgctgcgtagccggtcgacgcagctcgcggtggatgtcggacatagcattgtgcaagttggtggcattctgttcgcccggtccgatcaggtgtcctgcggtcgtcgtgacttttcgtccgaaggcttcgaggtgacgagtctgcaattaccgcagatgaaatccaatcagtctgtagcttggtgggaggcgtcggagggtgggaaaaagcctaccgttaagccggtgcccaaaaggccatcgccctcgacgatatctgacagacccgacggtgagtcgtcgcgacgctggttctccatgagacggagagtttcttgggctcaaccgaaacccatgcgatatgagaagaggaaagttggaagcttgcggtaggttgaagtaggagacttggtgtcacgcggatttaccgcgttccccgggtactgccgtatggtacttttacaagccaaaaccagttaggtacttatgtaaatctctatgtgtgcggagtatgcgctgtcactttggacttgccctaattcaagtgacttggaacaatatttggtcaaaatgcaaggatgttcaagtgtgttgattctcgattgtggtatttctgcaactgcctcggtcgcatatggtcaaaagtacccaatgcgatagatcactatacactagagcatcgtaagggttctagtgtttgttcaccgttttttctattcagaaattgttgagccctgcatagaagaatgatgtagagctttctgacacagcatatttcttttccaccccctcttctacaacgtataaataggaagacgagcggagtggacttgaagccggaactcacttcgcggtcccacagactctccatctacacatcaccatatatcaagccatggataccgccattgacctttcggatgctctcaaggcattggaccttgctaatattcgtttccagttgatgtgagctctcaccctttccttcagctgcaagactccccatatctttcccccgcccccgccatatccttcaatacacactatagctcgaaacaccacaattccccagactccaccacagtgagagccgctagctaaaagtacagacacgcagtcgactagaagacacaattaccttccatctgatcgaacgggttcaattcccgctgaacaagaccatctacgtccccggcggcgtcaaaatccccaacagcgagctcagtctgctagactacctgctccgcgaacaagagcgcatacagtcccgagttcgccgctaccaatcgcctgacgagtaccccttcttcccggaagtgcttgaagagccaatcctgcagccgctggtatacccgcgcatcctgcacgagaacgatgtctgcgtcaacgacgtgatcaaggagcgatacatcagcgaggtcctaccagcagtgtgccccaagtttggacgggaggaccgtggcgagacacaggagaactacggctccgcggcgacctgcgacgttgcttgtttgcaggcgctatcgcgccgcattcattttggaaagttcgttgccgagtcaaagttccagaaggatcctgagacttttgtgcgtctgatcaaggccgaggaccgggcggggatcgacgctgctattactaattctgctgttgagctcaaggtccttgagcgtttgggcctcaaggcgaagacttatggcactgaccctgctttgcctgatgagaatggtcccaaaattaacattgatgctgtcgttgctatgtacaaggtgcgaaatgacatttggggttttgcttttaggtgtatattcgctgacttctgtgctactttgataggaatgtgtcatcccattgaccaagattgtcgaggtcgagtacctcatgcagcgactcaagggcacacaatgggaataatgagcacctgaacatttatgagaatgacgtggccgatgcaacactgtcctcgggatatacagaaaacaaaaggcaaagcaaaataagctagaactcaatagattttgtcgtaaacaggacatgaaatgcatcagactacaaagtcttaaccttggctacgacatgtattgcgtaagagccttaaccataggctcaaacttggccgcctcaatcaaaatcaagctgcctttcgtccggatacccaactcctggaacgcacgcttcgagtctgcgtgcccttcatcggactgatgggtataatcaatagagccagcacacagcgcatggcgctctataacctcatcttcggggtggaagaagaatcgctcggcctgctcaccacccttcttctttttcttctggggccgcgactcttgctgatcaagctttgactcgacttcctcgtagttcttcgagaggaccagatagtgtgagaatgtgtagggctccttgtcctcaacagcccaggcaatctcctcctggagcatgttgtacatgggagggacaatctcggacggcatgttgatcagccgctcggtcagaatgagaccgataggagggatcggggtttgggaaaggagctgggaagcggcggagagggacgggttggaggcggctttggtcttgaggtagttgatcaggtccttgacgacgggtttatcctgggagcagatagttagtacaacgaagaggcgaagatcgggaagtaacgaaccttgtgttcctgcaggttgataattgacaaaaccgcgtaggggtctgattcatgtccatcaaccttcactgttgatcccagtgttggctgagagagaatcaaatcggccagcgcggacaggtcgaagatctgagcatcgttgtcgaatagttggcgcaagagattcttcaggccgtggaaatcgataggctgggggtcgaaccattcgaaatctacattgaccatgtccatatcctgcagtcgtcatgattgttagcaatccgacggcacacagtccggggttcaagtctgacctcgtcggagtcggactcctctggcttggtgccgcccatggtgacatcaccaggatctttccgcttgaccatattgtgctaattgaggtatttttgtctgggattggtagaatcggagttcaaaagttgatcttggccccgcgttcggtgctgtcgaactttttccttatcggttgttatcgccagcgtaggtcattgttggctgttttccgtcgatggatggatttcaatgttctatattaggctttatatatcatttagggtcttaagacaacttgaaagaagactttaaaaaagatttgttaatttatagggtgtcattgacaagctgtctgggcgtaatggttgatatacttgcacctaagatataccaatacactaccgaaatccagaatataacagcgtccgaagcttcatagaaatgcccatctatatactgtgtggtaaaatacaaaatccaaatatacctgctttttcaagccgagcccccaagtctagacatcatactcaaccgcctcgacagtcggcactttatgaagcttaatatcaaagaactgagcgacaagctgcacacaatcccaaataacctggacctcctccttagggacaccaaggcgcctcgtaccacgaatgtgccaatgagtctccttgggcagattctgaatcatgataccaggcagcacaacaagctcagtatcaacatcatccaagatctgacgatctgacaagaacagcccgtaagtaatctccttggacagccaagaaaagtccttatgcgcactgaacaaatccagcgtgccagtagtgttgcgcgcatacagtttctggagccacccagtgccgcgctcgtggttggcctcgtcgcattgccatccctcgcgagtgaaggtgaaatccttgtcctcgtcgcgctcaacctcggtaatggccaggattgactcaatgggcttgcatactccgataataggcacggctttgacaagcgcctcgcgcagtcggcggatcagggcttgtcgggctgctgaggtcgcatattctgcttgctgggtgaggtggaggtagagctggtctgctcgctctgggtctgggccggcggctagtgtggtaatggctagtatgtaccatttatcgctgcccagactggtagttttgaagcggttctctagctcagtgaaaagttggcggtatccgggttggacttccgctgttgttgccgtggagaaactcatggttgttcttggttggtatggtagaagaattgaaacgattttaggcttcagctgcagaaagttgccggctcggattggtaatcgagagaacatgccaaggtggcgtatattgtatgattacagcgtttaagacaacgtcaagttggtgattccatcaatcgtagtacaccccgatggccgaagtgggtcgcggcaaattcaaagcattttgtatgatatcacaccacttctgtttcctttccagggtagtgatatgctcggctttacgagaaaacatcaagatagattgttcctacgttaattgcttctttagttagctcaggctttaccgcctgctcactgtgatctgctccctgatggttacataagcgtattgtcccgccgacctcggtcccgagatgccgcccaagtgccggcgctggctcgggagcacccgcatccttcccgctcggtacccagcgcaacaatagtacacgatctcttcaggtgtcttgctctataggatattgtctagaatttactttcaacgtacactattgaaaacatatattcttgtctcgtagaagcatgaaactaaatacacattggcaaacatataatatgtggtcatcccatatcgcaacagatacaaatcagactatatgctgccacggacttccaattctcatttatcttcctttgtctcgatgacttccttctcttcctttgtctcgatgccttccttggtctcttcctcgtggaaaaggttgaccttggtagacgcgaacttgcgggcggagaccttttgttcgaacaaagcgtccatctcggcataagtacgacccttgggttctggtaggcggaagaacgaccagatgaaggaggcaaggcataatccaccccagaagaagccggcctttcctctccagttccagccatccacattcagcatatacgggatcaccaccccgttgaagatgctgaagcagttgtacagattgcgggcgagaaccacggtcttgatgcgaagccggattgtaggaatttcggacacgagtgaatagcaaacaggcccggccgaggaatcataaatgaaggtgtagaccaagagcatggagccggtcgcccaggaggtagccgacgttgaaggggcaatcgcgataaatccgattacaaagaggatgacgcaaagaacagccagactgtagacatacaaagttcgtcgaccaagataggacatgagaacccaggagaagagagtgccaaagaaaccgattgcgtattgagccaaggacatgttgaatgactgagagacgggcaatccggctcgctggtagaaaacagtcgagtatgccatcagaccggctccgcagagattctgtgctgcccagatcaaacatgagatctcggtccggcggagattggtaccgcggaaacaatcgaagtagctggtaccttcattcagctgtttctcgacctcgttggtatggatgatcatggctacagtctcctccgcattgaagtcggtgtttcctctagacgttaaccttgtaagagatttgacggcctcctgtagtcggcccttccggacgagccaccaggggctctctggagccatcagaacgccaatgaagatcggaacgggccaaatccactggatggcaaatggaatgcggtaagcccattcgtcatttcgagactccagacccttcaagacgcccgaggcaatcaactgccccattacccagcagaggttgacgtaagttgtgaggtaggcacgtagggcgacagggcagacttcggacgcataagtgacagacagggtctggtagactcccagagggatacccattaggatctcaccgaccagcagcgtctcaacattgggggcaaagaatagaatgaagatgaaggccattgtggcaatgagagatcccaacatggtcttgcggtacccaaatcgttcggagacgataccgttggcaaacaatcccaggatctgaccacaattcatagcattggataatcctgcttgccatgctgccgagagcccttgggagccatctgaaagtgtgtgtccatatttttggttgaaggcggggaaaccgtagaacgatcccatgagcacgacgtcgtaaccctccatcacaattgctgtcgagatcagaacagaccatccaattgccttcgggtacagcttcaaagcctgccacagtgacatgcggtgttctttgtcggtggcgatctgggcctcctggaccaatgtaccaggatcgacgtccattggcgacttgtcgtcgggtgtctcgacatgctgggcagccgatttgaaatccatctcgttgattcagaggggcgaggtgttgaaaaaacgaggaaggtgatattggttcccacgagggtggatgaattctgagcgactaagcgtgcaccaactctatatatatcatcttccagaaatgatatttctaaaatatgaagtacatcggaacttccgtcggcgttaattttgctttttccaaaagggggtacgagttttctccccggatctcggtgtgatcataggcttcccgggccgaagaacggccgttcgtattgcagtggcttgtgactgaggaatgttcgaaaagccgactgatcatgttgtccctctgtaaagccagggtaatgagaggaagcttttcacatcgtatgaaaccagcagcaacaagcaatccgatgcggcttcaataacgaacgaaaacagagaatcggtaaaatttcctgtaaacagactccgttgccctaaggctgagacacggggtaatttgctcttcccagtggcttaggcggggaagcgacggggtaaaaaatctggttggccatcccacattgcagaaactggggaaatgtgcaagtcaaggaccggcccttctacggagctgcaccccgacctagcaaggttcgactaatgcggtcttgataatcctggtaaacacatcttgcaacttgaacatgcgaaccgtgcgggccgtgcattcgatctggattggccgccaatttggtaataattggaaagaaatatgacagtgacacgggagggagtttgccacggaactctgttggtcaagtgacccgacattaccccgtccacttcattaattgcggggtccccagaaactcggctgaccccgtggtttcccggctccggagtcagaggcccaacccccgaagcgacatggaagacagactcaatgtataacaaagcaaggtacgaatgatccgagttcgacgaactgcatatttttctaagtttctccacagccaactttgaacggaccttactgtacaggaagaagtcaagagcaaaaaatatattaataccatgacgacgccttgacagtgcacaccgacttggcatggaatcggaatcgaacaggatttgttggcccacccgctgccgtcaccgacgagatcggaaacagagcactcatactcgcttcgatcactgggatgaatactgctctcgaagaaatagttccatagctgctgtcaactgctgcgggttcaacaaaggccgctcgaaaaacaaatgttccacgcagctaccagttttgagcagtcggtgaaactcgcagagccatggtctcatcattttgtggccttcgctgactccacgaccctgtaaaggtgctggacattatatttgcgtaacgggcgggcagatatcacatgaacgctgttcaagctcgctaaagtcttccacgcgcatggttgatgagtggggttgcttggcgctcgttcggctcgcgtaagttcgaacgggtggcactcggattaccttctaggtacggagtcctccgtagtgagctagtcacctgcgagagtggaacttttcgcttctatgatgatctgtgtgtgcatcttcaataggcagctatcccgtgactataggttcaatattcggagcgggtaaagacctggggaaattccgcgggcggataatcggagtttactggggaaaggcattgtagggctctcgggctaatcatctcggaacgggctatcatcggtgttactgcggagtagatcttacaattgggagattgcccatcagaaggcccttataaatccgctcgctcacttgcagattgaacatttcaagagaattttctattgatcttttcctctcgttttgtttgcaatctcaaaatgggctcaatcgataattctatagacgcgaacgccgtcgctggacgacggaccgctaaggcttggtggaaagagtcctcggtgtaccaaatttacccagcttctttcaaggatagtaatggcgacggcgtgggtgatattcccggaatcacctccaagttggactacatccacaaactcggcgtggatattgtctggcttagtcccgtatttaaatcaccccaggtcgacatgggttacgatatttcggactactacagtattcacgcgccatacggcactgtcgaggatgtcgacgatttgatcctaaagcttcatgagcggaaaatgaaacttgtgatggacctcgtcgtcaaccacacatccgaccaggtttgtcccacttcctccctaccatgtgaatacacggataaggaaactaacatacacatttttagcacgaatggttccgcgaggcccgttcctcggtagacagtccttaccgcgattggtatatctggaagaaaccagtgtttggcgccgatggcaagcgtcagccgccaaacaactgggtgtcctactttggaggtaaattctcacacaatgcctcagtgtcttatcaagtaactgacatcgatataggcagcgcctgggagttcgatgaagcgtctggagagtactatctccacctttttgccacagaacaacccgacctgaattgggagaatcccaaagtccgagacgctgtacacaagattattcggttctggttggacaaaggtgtagacggattccgaatggatgtcatcaacttcatcagcaaggacccgttgttgccaaatgcgccgatcagcaacccagattctgagtggcaaagtggtgcacagtactatgcctgcggtccaaagctgcatgaatatctgcgggacattggaagcattctgaaagaatatgacgcattttccgtcggcgaaatgcctgaagtcaacgacgtgaaggaaatcctgaacgccgtaggatacgaccgtggtgaactgaacatgatattccacttcgaaatgtgagtgatctggcttatttggctcaaacacattggctaaccagctcgaagcgtttcactggaccacggaccaggaggtaagtttaccagcggtaattgggaaatgcaagatctcaaagccatcgtgtcaaagtggcaaacattcatgcaccaaaacaatggatggaacgcattgtatctcgagaatcacgaccagccgcggacagtttcccggttcgcgtctgacaaacttgaagaccggactctgtccgcgaagatgctggccactttcttgggcttccagagcggtactgttttcatttaccagggccaggagctcggcatgcctaatgtgccaaatggatgggcgattgagaagtaccaggatatcgaaacactgaaccattggcaagagtaagcatgtccgtctattccaaacacggtgcgaccactaacggatctttacagaattgtatccacgaagccggaagataatgatctgcactccactagtcttgccgaatatcggaagaaatcgagagataatggccggactcccatgcaatgggacgcctctacttacgccggcttctccgatgccaagccttggatctccgtgcacgatgattatccagtctggaatgcgtcgatccaggtggatgatcagcagagtgtatatcactactggtcgaatgttctgcgcttgagaaaggaattccccgatgttctagtatacggatcgttcgagctcatttcccctgagaaccctgacgtgtttgcctacactcgcacctccgagaccggcagccttgcgcttgcagtgatcaacttccgggctagcgagatatcgtggaccattccggaacaggtcaagaaactatggtcctccgggtcgattgctctgtccaactatccccagaacaaacgatctgtggtggatagtgacattgcccttgcacctttcgaggcatttttgtggttggcttaatatgttgtggctgggcaaaccccgaccatgccgtgaaatacatagttctttggggcttttcgtttcatgtgatcatcatacgttttcccgtaaattccctaccgtgtcattcgagcaattgcgtaaaactgtgggcctttttgagcactccaattggctagaaactccgtctaatagtcaagaagcggcccaaaaccagccccgaagaaggcccgtacctatcaagtgcatctccacctgaccagacctgacctgactgaccatcgcaccagacccgcgtggatttgcggggttatggctacatccaacggtggtcggtaaaaattgcccagtccttttcggtttagagagacaccccgcaaataaatatgaaagccgatgaacataactccgtaataagcgtacatttgcgcactgatcgggctgatttcggcaacaatgagtgcctctattcgacccacgcaacagcgcaccccggcctgcgacaattgtcgccgacgcaaggtccgatgtaatcgcgagcaaccttgtggaaaatgtcaggaggtgtttctcaattgccagtacacctccgtcccccgacggaaaggacccaaaggccccacggctcctgtgttaagctcgctgtcttcatcaagcaaccattcatctccacacacatcaagtgtctcgttcgcggcaagtgacgcaggacacgcagatgctgtcggtcctccctctgagtcaaatcttgaggaccaatggacgtttttaccaacgacagaatgcccagacacacgcttcgtgggcctcctcaagagtccgacatttcctactgcagcatgccagaggatatcccccgtcttgttgcaggctcatgtcgacatctttctcaaacatctctacccgatcatgccagtattcgatgccgacacagtgacagttgaatgcatgagccctgaagccctgtcaccgagacgatatgctttcatcgttgcgctgtgtgcggcgactcatctgcagctgaagcttgacatatcggagggtggcactatcgaagaactttcattgtctggccaaagcctaatcgagcaagccatacaagcgctacaagaattcgacccccttgacgaaccgcacaccgatacgctgcttgccttcttttttttgttctcggcgtacggcaacctggacaaacataaccatgcctggcattacttgagccaaagtatctcatttgcccacctcttgaacctgcaccaagaaccaagctacctagcccaagatcctgaaacggccgagttgaggagaaggatttactggctactcttcattaccgagaggtatgctttgcccctatactatatcctatcgcgcatacgtacttgctaactttgtacgacagagcgtatgccttacagcgtaacatgccaatcacactacgaggacgcatccagaagccgaccgtcttcacgtccaattcccctgcactggcttatggattcgtgaatttgatttcagtcttcgaaaagatcccatctagcttttacgactggaatgcgagtgccgcgggctctctcggtgactctgcgatgataaatcctatatatcaatcggttgccctttccacccctttgctggctgaatacaacgaaacccagaaagtcgatctaatcgtcacgcggcagtggctgcaaacacgtttatggaaggtagtaagcgatcaagtcgactcaacctgccatcagggagctgtcgtgccgttagatctcccaataacggcagggaagtccgtaatggctctgatgtcgactgttgcacaaaagtcagctgatgcgcatgggataggcatcgtaagtaattgtctcagcggaaatcggccctctgcttatcggtattgtaggaacaaaagctctacgacattggagagactgtgtcattgctcgcacatgtgttacttcccaggaaaaacgacggcgttggagagctattcgcgcacgcccaaaccgttttatgcggcatcatcgacctcctgtcgaatattcgcggaggacagtcgtatctattttcttcgcttcttcagcagtcccacgccatacttggcctcgaggccctgccgccgcacttagcgttcccttcctactggaatcccactctagctgataatgatggttccttgcccggaccagatgattgtatgtcactacaacgttacaaaacttttaaagacaattgcttcgacccgaaattgtcgacatgaaataggagtcgacaagcggaatcggtgagccattgactcttgcaatgcaaagttgcatatggatattcccctttgcccatccacgctacaaccaggaagctacaaccaggaatctggagaatgctttcccacgaaggttggctcggatttccaattgttaggccacaatttgccaatcggaatctcgagtctagtccgtggcattagttggctgagcgtgatccccaatacctaggtattcaagagggactaggacagaccacagagcagacgctgaagtggcgaagtgaccagtccgaggatgaggggggtttgagacggatgttgtaatatatgaattgtacgatatgatgaatatatgtagcaaccgaaagaggagtcctttcgtgtatatatatctctcttgtcaagacagatttccgtctttaagtacagaatgcaatcaacctaccacatgagaccgaaacattgaatgtttgttctaggacttaatagccagcgctagaaactaagaacgatcatcgaccatttaatgcaaaacggcctaggctatccgaacgaattgtctatgacgcttaattacattatttggctagtgaagcaccggctcagctccatataagctgtacatcaagaagcgcataatatcaaaacaatgcctctgatcattcctacaaccttgtgccttcctgcatgctgatgatcacgtggtgtgactggtttcattgcaaaggtgccccttgctacccatgttccccgaccaagaatgtcagattagagatgtcttcattaccacgtccgataagttggccccctgttggagatgttagaacggtactccacactcccttgccctattgccataatgttgcctgacgtttcaacaataacaataggaagacaaccaacccaacccactgagctcagtcgatgggtactcagacaatatcgcacccaacgtgggctattccagcgtgagggacgttcaaggccaactgatctcaggggggattactggaattgtggagctccttgacgatgggactgcactcaaggcaccatatccaggttctgagatcgaaaacaatatcatagatatcgccaaagaagccagtatctatcgtcgcattggaccgcataagaggcttgttcggatgctaggtcattccagggaaggtcttgtgcttgaatatatgaaaaacggtgatctcaagacatatggctcacgactcggtatcgacgagcctcaaattgaaatgggcgtaccaagtcgcagaggctgtcgatctcttgcatagaaacggaactatccattgcaatatcaaaccacgaaatcttctgttagatacagccttcgacatcaagattattgacttctctggttcttcactagatggttcgaagccagcctctggtgaaggaacccgattttttcttccacgacattggagagagcaaccgacggtggcgacagatcttttcgcactagggtcgactctctatgagattactcaaggcaccagcccgtatgaggagcttcctagtaatgaggttgaaagattttttactcaaaaagagttccccgatatatctggtatagtatgtggacaaatcatcaaacaatgttggctatctcagattgattcagcagcggatgtgaaaactgccgtctgggatattatctctcgcacatccaaggttgactgtatccctcacctcgatggtttggacactgctcaggatatgttgattggcttggtttatccttagagttggggtagtcccaccgttctgtcttgtcttggtatacccgcaagttgtcaggcctagccatcctcgaccatgtacccacctccttgcaccgctacttacatcgctccttccagcaggttaatttttacgatattgtatttcaacatagcgagaaagtatgagaacagtatggggtagttccttacgatttttgtgccgaaagagtgggtaaagaaattgagcgaagggagccacgaagctctctgaatagccccttgaatggaaaaggactcagcaacagaggcccgaggtcgcacttggggcaaagagaggtctgtcgacctgcatgaggtgtaccaaactgcatgaagatagtcaaagttccgaagcatgcctgcatgccacagacgcaataataaaaaccttgttcaatctcaatgccatgcgaatccgagagctggccgagttgacagagctggaattagccgtcggagtataatttcagcactggttcttgtaaatgacagaaaatctgcacgtggaaaattgtcggcgaacggaagccgtgacgaatgagaagatgatgcagaagcatttaggagctgtcgtacgtcatggggtcttggtataccgagattttctcaacagtcattcgcagttggcaaaactttgtttcttattgtgaagagactccgaatcccggagtctgacaagcgggctccggggctgttcctgatttgtttcgggccttctccgggcagtttggtttgcggggaacggaccagggtggtttgcggggaccccacgcggctgattttgtgacgaacgaaaaccacgcttgcctggattggtacgtaggcggcttccattggtcattctcgaaggattggtttccactgcgtaacgaactatacatagatagcggatttttatggaattactcggaatcaagtacaacgtacgatggacaattcggtgtggtactctatgccgagaaaaccccgtcgaggacctgacgacgagtgaaatcgacgagataacccactttgacatcccaaatggtcgaaaaagcggagcttgggtgtacttttgatttgaaccgagccccctggaggacccatatctcatttgcaacataggagaatgaatgggttggattactggtaggagctatactaatcatattactcccttgctggaaggggctcttcgtctctgtgttagtaagagtcccattgttatgccagataagacgcggcatactacactagtactatggggtaattaatttaacgaacttggcattcgcgtaatggaatggctctcaaaccctcaaccgtcaatccctacactaagtatgcggtaggccccctccatggcatcatcaacaagactgaataataccggtcaaccgtcatatgccgcacgaacacctctcggagcttccggcataagctgatcccccccccttaatctaaactttcatctaatccaaacccgatttaattgttggttagatcaggcagccctattttaaaaaataataataaattccgtcttaatatgtaaaaataccaaaataaataacacaccaactatgcacgagaattcacgagtggaggcgggtgaatccttcaggtatataaaaaccgttgtataaagactgctttgcccccttgcttggatagaataacaatcaattcagccagcatccattccttcactatgattactctcaaatcttttctactccctgctatcgggctgcaaaccctagctggggcgtttgttctaccccgagaaacggattctacccccaatacacactgtggctcggatttctgtacctggtggcacgacacggccgagataaacacagccactgctgtcgaagcaggcaatgtccggcaatctcaccaatatctcgttcaggttgccgctgctgggtcgaacacctcatacgattccttcgtctacgaaagcattcctcgcaatggcaacggaaaaatccagacccccggagataccagcgacacattcagcggcgacgatggaatttcaattgagattgatgctggcatcaatatggcgtggtcccagtttgaatatagtgaggatgtcgatgtcaccatttcccgcagagacggtcaggatgttggcatggaccttatcattcggccgagtaccattgcgtatgaactcagttacgcggacaatgcagtgatcatccgtgtccctgctgatgaaaacggacgcaagttttccgtggagttcggcaacgacctttacaccttccggtctgatggagaagcttataccaccgacggatcaggggaagtcgttgggattgaacccatcaacgctctgctcatcttcgccagcccattcctctcaagtgatcttatcccagccagcgatggtgccgacaccgtggtgatgacacctggtgcattcaccgcaaatgacattggctcggcatctattgtctacttctcgcccggcgtgtactatatcgactcggaccctctgggtgaagctcacatcaagctcgatcctaacacctactgggtgtaccttgcccctggagcgtatgtgaaaggaggaatcgaatacaccactacagcccaggacttttacgccacaggccacggtgttttgtctggggaaatctacgtctaccaagcaaacgtggaccaaggctacacagcagtcaaagatgacgtgactagtcttcgaatgtggtggcaccggagcgtcacaagcggccaaatctggcactgtgtcggaccgactctgacttcgcccccgttcaacaccatggatttgatggatggaagttccgaccgagacgacatctcggttgatatctacgattacaagcaggtcggggccttcttcatgcagactgatggccctcagatgtacaccaatggcagtgtgcacgatgtcttctaccatgtgaacgatgacgctatcaagacgtattattctggagtcactgcatcccggctcacagtgtggaaggccttcaacgatccgatcatccagatgggctggacacctcgcgaagtttccggcgttaccatcgatacactcaatatcatccactcacgctatcgcaagagcgagaacggtgttccttcggccattattggtgcttcgccaaactacgacggcagcgacaatgttgatagctccaagtcaatcagcatgagcatttccaacgtctactgcgagggtccttgccctggccttttccgtctcactcctctgcagaactataagaacttcagtgtaaagggagtatccttcccagatggactgatcggtggcagtgtccccgtcggagacaccatcattgcttctacaagtgataccacttacgatggatcgactagtctctccatggagctggacatttcgggatggaccgtccaagggcaagcagtgactggagacaatgcagactctttgggtcaattcaacatcaatagtgcctactctggacagtggtcaatttcttcttgattggtataagctatgcttgacccccttaagagtttgatacgctcatactcttctcaaccctcggtcactcatttgtatatatctttttctttttcttcctcagtttgttgatattttcacttattataaatccaaattattattccttgtcagcctcaattcaagatactcactctttactccatccttctgctcgaaccagatcatttccttgagcatttcctccaactgcagacccaaccttgtgacttgagcatcttctattacaaactccgcttttacgatgccatcactgccatcgagccaatcagtaagatgagcatcgaattttcggtcatcggacacatgctcgaatttcaaggtaaaccccattgagcgatctgtagcatcgatgaagagcgcatcatctctgatttggaccaataagttatgatacccaggattccagtagttgccagcgtaagcactgagaggcattgtcggtggctgcggagtatgcctttttggtctttgttcattcacttggcccttctggatatcttgactttttttcacttgggttttcttttcctgctttttcttctccttctttccctggttcttactcattggatttgcatctttcacctcggcctggggttttggaccgcgaattttaacaggtcttgtggctttgcttttgctgtcatgaggtctttcgtccatgactccaaggagattgtcaattagctttcggacaagggtcgccgcaacgccatttgccccatctgagtttcccatgatcacagcaccgaatgagaaatcagggagaaagaagaagcgacttccgaatccagagaataccccattatggccgacgaccatatgtcccctgtaaaagtagatatccagaccagcagcatatgctaccggtgaggtgtgccgcttccgtcttcctgggtttggattcacaaaagttcgcaggcgagtgagtccttcataaacatttttattgatagggtcttcgcgattcataaaagccttgacaaatttgatgaagtcgttcacgctcgaaatgacagaccctgcgccttggccttctgggcagtccggattttctaacccacgatatgttgagtcggctcttttccatgtgtagccagttgccatgcgggattcgaatccttttgatcgtgcgctgctgggttgaagagtagttgatgccatgtccagaggcttgaaaaatcgctcttcgaggaatgtaccaaaattctgtccgctcttgacttccacaagatgggttgccactgtatacatcatgttgcagtaaatatactttgatcgaatgggagcagcgacagggagattcctgaggtttctcgtaatggatcgagcattgtctggcttcgccgctcgcacactcatataagaatcgttatggctggcgcaatatcattagtcttgaactcaaccatgaaatttgaaaaaactagttcacctaggcattccacttctatgacttaagatgtcttccacgctgactccttctgtgtatccttttccagacataacaaagtcctcggggagaagagtcgacattacagcatcgtactgaatatccgggaacatgtcattatcggcgactagcaatcccaccgccgcagcagtgagtgatttagcagacgatgcaatgtcaaacagcgtatctgctgtgcaaggtatttctggatccaggctcgcatgtccatatcccgcagaggcaatttgatcattgtgtatgattgcaatcgccagccccgggacatgctgctgatctatcaactctgtcacatgtgacgcaaaccctgccgagtgcaaaagatccatattgctgatttgacgaattaccggtgtgcgttactgaatgccactatagaggcctgttcatgtaggttccagccagtttctttgcgggaaaatacctcagttcaaaccttgaaatgacagatgccacctggcatgagaatgggggccggattataacacgcttggtcagctgcaacgcttagtgtgcatgccagtgccagatagctctcaacgttgggcccttcgtatcgcctaaccggggcggtggggcttcaatccgactgctgcctgtttgaccatttaatagaaatatcacaggcacttctaagttgtaggacttcatacaatttctgtatcccatgcctaacaagaagactatattctaacgaaagatagatactcatctactattaccataattttagcccttactggagcaagagatgccaaattacctctcgtctgtctgcatgctgtcatatagcgccttgaacagtgatcctggccgttcaagcagctcacgcggtgggcctcaacgatacgccctttgtttggcaccacgaagcgatcaaggtccagcgttgtgtgtagcttgtgaacaacaacaatgacagtgcacgcctcaaattctttctgcagaacctcgtgtatcaaagtttccgtatccgcctcaacactgccaccaacctcatctataatgaggacgctgcttggattgattactgctcgaacaaggcagaacagctgcctctgtccatgcgacaaggtcccttcgttcatatcctcatccagcccgccgcgagactcgcaaaagtcccataggcgcacagactgaagtgcctgaactaagcgctcgtcagtagagaccctgagaggatcaaggttctcgcggacggtgccttgtaggaagaacggatcttggggaagggagttgaagcgagcacgaacggcctggcgagtgatggtgctgatgtcgatgtcgtcaacgcaaatcgatcctaattgaagctccagcatgcgcaggagagttgataccagggaagatttgccgctacctgtgcgaccgcagatggctacattttcaccaggtgttatggaaaggttgatgttcttgagtactgggtccgtggaagtgtcataggatacagtgaaaccgttgaatacaatggcacccttttgcgggccatttgtcgctgacatgtcctgtctcattgggcaggttctcgtcttttgtgtcgagaatataggtacggacacgactgatagccccaagagccatttcaatctgcgtccactcagtaacgagcgtctgtagcgaggtactgaatgtcacgatttgatacagggctacgccgagatagccagttgagccactgccgctgatatttgtcaccaaggcaacgagaataatggcgattccagcgataaatagatccagtaccattgtcagccatcgctggacacaccacagcagatattatggcttttatgacacgttgggggagtcgtggacggattcaacgtagtggcttgtccagccaaaggcccgtccagaggatataccacccaaatttccaagaaccgggagaagagaggcgccttggcttcaatatcgagtattcgcagctgtctggatgtgcgcagatatagcagctggatggccacgatgactacaatgcacagtgtaattgcgatggcgacgtagccagaggcgatgaataagaataagatgaccgccgacatgatgactatcatcgaaatacgatctttgaaaaatcgaaagactttccaactagaataagtcaataggtacaaagctatctgcactggatcataataactaacgaaaacaacttattcacacaaaggtaggttgtagcaagctacaacgttcttctcaaggtataaagtggggcggaaattaagcggaactctaaagtcaagatcaaccaccttcgaatgtcatcgagcaccaatgccttgattgcaacgctttgcttaaattatcagaaccctagagaaggcccaagagtacctgcaatcaatgatgaacaaggatcttttgtgccaaactgggctacgccccactatgatctcagtgactccagcatgacatcacaaccagcataccaagtataagaccgagctcttccaatggtaaaaaaaaaaatccatcaaactcctcttctattcaaacgaactacttctttacgatacttctcaacctctcaatccctaaatccactttatatctacacaaaatgtcgaactcaggtcaatccaacgtcggaaaccgcagcatctacgaggcaggcgaccagcgcaacgtccctgtatccgagctccaagagcgggcccgctatgccgagggtatgcccaatagccacaagcacctcgattctaaggacggccgctccattgccaacaagcttgcctctcaggagaacaagcctgactccacacaccaccacaatagcgagtacgacgctgaggccgagttgagcaagcaaaatcctaccaagcctgtaagttacatacaacttttgctcacatgaaacccttgatcaagatgcatttgctaacgcttagcttcggtacaggctaccctccacggcaatgctccgtccaagggtgctaagattgatgctgagctccaggctgatgatgagcagcgtctgcgggagaagggcattaagcactaaattcgataatgctgtttttttatgttacaaataccccctcatgtcttctgattggaatttgaatattcatcagcgggggatgggagggttcatggtggaacatgatgtacaataataatgatatctggtctaacgttatctcaaatgagtaacgggccattgaatgtatacctacattgatgacaagacagacgggcgttgaagatttgtagcttgtatacagtatcttgtagattttgaagcaattgaagcacgtgtctatgtggttgtctgggtgttcgcaactctgacccgtcgctggttggatgaccaagcataatttaacgctatcgatcggaatgcacccgaggtctgcgggtcaaattcttcatgccacttccacctgccaaagacataggaagtagcgtcatatatcatttacactttcgtacgtggaagggagaaccggtgtaatattttacatgaagagggaaaatgtggtccaaatccaaatataccattgtaaacgtatgaataaatagaacatatgtcgtgagatcgctttcgaaacacaattatacgatatgtacgagacagatgtcaaggcgaagctattgtacatcatgaagtatgacagcatatacaaagccaaacaggcaccaaatacctgcaacccttccaatagggtgactgacttattatttagccaaaatagaatggcttggatgatcgaagagccccactgccaactaagacagggcttatccacacagataccgaggccatagcaggcgtatatccggagtgcagttggatataagccaaacatcggaatcctgttcggcgagtggagtggaggggaggagaggggaggggaagctgactggtcgagaagcgagccaaggcacaaaatatgccagtgagacctgagatcagccatccagagtaaacttggggtcatcgtcatgcggctcggcaaagacatgaccccagtattcctcgactctcttgcataggtccactttgttctcccacgttttgaacgcagtttcaagattgcagctcacccatttgatctcctcccagtaagccttttcgacatcgtatccaaatcgcttgatggtctctgggggtgccaaccaagcgcgtccatctgagccgtccttctttaaggtaggagttgtttcccatcccatgccgaagatccggtcaccggggttgaacttgggatagtttgcgtggatgaagaagacgtgcggtgcgggggcaaccgactcgtcttttacacgccacttgtcctgctggatcaaggcaaaatcctcgcgcggatctgactgtgccatagccgacccggacagcccgtccgcgttcgcgtgtccgacagcctgcacacgttcactgacagtatagaacggtgcgcctacggctgaggcagcttggataaaggtttccttatctccctcgccaggtgccccttgactcaacaagcggaaataatgcgaggggccgtaaaagttataatacgctgccagcaagagcgctagagagtgagttttcttagatactaagaaaaccccggtttctgacgactgtctggcagccatggacggtgcctgttggcgtgaaattttgtagtacaagggagatgcggaggaagcccagaagtcgggccatgtgacaagaccattggttttgaatggctccgagtcaagcaaatcctcgggtttaccaagagggaagcagtcggcatccatccagactatttcttcaaaggacgagaaaagaaccgcgaagatcttgagttgatagtgttcaatgatgtttttacccaccacgtccgccagcaccaagcaccgcgcatcgagtttaggaagcacctcgttgcagatttctttctcgtgttcagtggcgtccttcatgtagagttcaactggcaacgttgaccccgcgcgacggagcatgcgcaatgatgagacaaacaccgggaggtatgtagagccagctgtcgataccagtcctcgcttgcctggggtatgaatcggtttcaactccttgtctgactgcttgatatcctcgatgaaggccgcatgggcttcctccatcttgcgtacatcttcatcgctcaggcccgtcagatcgggtcgcggcacgtcttttgtggggtcaaagtgctgggcttcgacatcgcctcgcttttccggggaagggcaactcggcttgtggcgttcaattatgggtcgaagaactttccagaagtccttctggcgttccgtgagtggaacctcgaatgctgtgtttgggactagggggacgttggaggacgcggtgattggggatcggtaaaagtagacggtgcacactagaatcagagcgagcatcgctagtacgagcgccttcgctctcccaggtcgcaaagcacccattattgctagatagttcggataactgcgcttggattcaggggttgaaggagcggcgcacgggcacgccgatcgacttttacttatcaagtgaaggaataaaaaggattcatatatgtattgcccgattcacagaatgtgacgaccggaggagttggttgcagagttgtggcgcatccagggagtccgggcggaaaagaagattaggcttggcaaccttagaaggcctcaacggcctacgtaccttacgacgtacatgcacgagttgctggaccagtatgtctacatatattgtcctatataatcaatattggatcctttgaaggaatcaatatcggacatgagacacgagaccgctcgaaatcccccgattgtacccctgaaagccgaggcctgcccaggtgctaactagcattgaggccacatgaaagatcgaatcagaacaaatatcagacactgatatttaaccactcccatattccaatggtatgaatgctttcatgatcatcgtgggaccatttgcctttaaaaggcgtccccaatccacgtgggcaggtcgactaaagcgcggatcagcctccaccggggaagatcgcatatccaccccccaacctttcctccgtcatattattattccttctttttgagtcgaaactcagagagtctacagtttctacttaaatacgtcttccccccaccaaacccccaaacccctattggattcgccgatctttcgggattccatatttccgccccaattacgaatctacggaatctacccgcacaaagtaacttacgccccgtgaacgcccattatttcaatcgcataggtctttcaggagatcttgacggatggactccatccgggcattgcccacgccagctcaagatggcctccgataatgttgatagtcccatgcgagacgccgcgcccaagggaaaatcccgcaagaccgacccgaacgctccgatccgaaaacgccgcaagagaaccgtggtcagcggagcgtccgacgactgctttgcctgctccaagcgaggagcacgatgtgaccggcgccgaccctattgctcccagtgcctcgaccttggccgcgaatgttccggatacaagacgacgttgacatggggtgttggagtcgcgagtcgggggaaactccgcggccagcatcttccggtgatgcaatcggaagcacagtcgtcggggaatgcagcgagatcacaatcgaaggcctcaaggagcggtgacccgtcttcttcacggatgcctgataatgcttcggcgcctccgtccaccggccctgcaatggcatcgtttgaagcaaggacgccgagtgtgaaactagaaggtagtccatccatgatgccagctgccttcgacatgtcttcaaacctagcttggacaatggacatgccagatccacaatcgtggtcgaacacgcttgctggtccgcctgcgatctcggggcttccgtcacccagtcggccgatgattccaagcaatacgagccaaaatatgacctcggagccgccattgctgtatgctcccattcagagcccgacggctaattatggctctctggtttggccgacagcagttcgattttcatctcacgctgctactcccccagcgtcacaagccgatgaggaggatgtcaaatacgatcctaattatcatgtgttttggaacgctgcccattctccgtcactttcacagctccttttggcacgatccgtagggcggaccccacgtattcgttatctcatcagttactacgctgaagttattgcccctatgattgttgcttttgataccccaacaaacccgttccgaactcacgttatacgcttggcaatggagagcgaggctttgcaggaggcgattgcaacgttggctacgagcaacttgcgccagaggcgagagcacaatcatctctccacggaacgaactctgccggcacgtatgtcatcaatggctcaccgcgccctcaccgacgaagatttccaagatcgatatggcatctccatggtcgaagggtacatcagagaagaaaatcatcatcgagggatggccgtcaaggctttaaatgctgatttagccgaccctcgtcgcaggttatcagactccgtactggcaactctgttggtgctctgtcttttccatggctgcgatactggcgttgccggattccgtgcacaatttgctggagtaacaagactacttgcgatccgaatgcgccattcccgtgtcgtaacggatgaactaaaatggttcatccgcatgttctcgtggtttgatacattgacggcaactacaaatgaccgtgatgtgcaactccgcggaacatgtttggaaatcagctccataaccgatggagaatggggtctggagaacctggccggctgcgatggtcgtctgttcaagctgatttctcagctgggacgattgaatcttctcagccaggaccaggagcccaacctatcgcgcccaaacgatgctggtgtccccactgcatcccttcctcctaatatgctgttcccgggatgggacacagttgtgcccaatacaggaacgggctccgtaccggaatacggattttctcttcccacaccgccgcaaagcagtgactcatcccatcgtcctacctctccagaattctggacagagtggtattcgctcaggcagcgactcgaatcctggcgattcgacccacctgctcatgcctctttcccctctccgcccttatctgcatctgcaatggcctggaatgccacgacttatctgacgccacggacttcctcctcagcataccaagtggcacccgagaatctccaggacgtctaccagatctcggagtgttttcgtcatgctgccctgctctactgcgaacgtctagccgagccgacccttccatcgtctcatggccgtattcagcaccttgtccagctcgccatgcattgtattattaccgtgcaatcggacgtatatcttctctggccactgttcattgtcggctcggagtgtgtccaggataatcaccgttcgatcatccgcaatcgctgcaaggatatttccaaggactctggcttcatcaacaacctttcctgtctagagcttctggaacggatatgggctgagcattctgatgaatcttcattcccagtctaccctagcgggttgggtcccccgcctccgctggctggcggcagggcaccatcacaagccttccgttggtcgcgagttatgcaggccaagcggggtgatggtgagtacatggttgcgtaggcggtttgccttctatctcttttaatttttttgcccgagctataagcttccggtttccagctttacagcattctggtgggacgggcccattggatttttctttgttcgaggatcagcgactcgtgtcttcaaatgataccattcattctatattcagcaatattccccaaccagtactatctacattgtacatattggctctttttttttctgggtttgcttcgggaaccagccttccatacatatacctacaaaatcaggataaccattcaaaatatagaccacgtcataattttatcaatgaaatgaacctataagacaagcaatttggacaaaggtccttcgtaatacgttgtatggaataactaatctacgttctacaccaccaaggctcaagggccaaatagggcctggcccaagccactcggagataaccaaccccgagtcatccccagttgatatgcgcaaaagtaaaactgcgcaaaaggacgaccacataacaacccaacgcaggccatctttccctatcacacatctcacggcgctacgacaaaagtaccaacccacaccccaacctagacctataagcgcttagagactacattatagggcacagggcaagggcagccacccaaaccctataagatcagcacgcacaatgaaaacctcgaaagtttaacacaaaagccggatagtatcaataatacacgtactaatgaccgtcgaagatcttcccgaccgctagtattccaaccgggcctagaatactcattacaaacactaaaatgggttcaaggattcgttttgattctcccgcgacaaagccgatgtccgctcgtgcaaggggtggcagattaatatgattctgttgcgaaccgtaccgttcatgtgatattattgatggatcttatccagagcgtgcatgtttaattagatgcctagggggtaaggaggtaggtaggcataggtgcttgtaaatgtaggtgaagggttgttatcattaccgctccctgtacttccggacttggcggacttgatatcaaaagcaaatttaccaatcatcgcacattgaaatcgaggaattcagcagtctgtaatcccccgtacgaagtacagggtacccacacggcatctaggcgtccaccccctatatgtatctaaaacctgatcgtctacggagtagcaaggatgttgagccgttaagccgccacggcttaatacactatgtaaccgtaagccgtactaagcttagatactccatactgtgcgcatcgcacgagaagcacgggatataaattaaaaagagccaattatctcgctcagggggggggggaaccggtgtacaaagatgtgtgtgcgtgtccccgtgcgccagttcaaggttatgttcctacagccgagaaaatatgcgtcccggcttccagcccgttggccccctgcagccttgttagcgggcttgttggtggattttgggctttaaaccttgttccagaaattctatcactcctaggcgagttggcattacgcactaaataaattaaatggtacatggatttgttttctttctttttgtccgtcctcggctgagatcagcttgggtggccaaggaggtgaaaataggggggggcgatatcgagtcagatctgttagacgtcggattatctatacaacatagacagatacgtctactccgtactccgtatatattttgtttttaatatgcctgcatgtgagatctatcctgcagatacgatcaaaaatatgttaggtaggcgatatttcctttttggaaaataagtaaaaataagccatgtgcaaccctagatgatcggcagtgcaggacggggtttggccttctgtttggctggttgattaagacaaggggggaatctcgaagggttgactcattcagaaaaacaaagccctcgaatcagggatggacctgggattcttctgtgtgggcagcaaggacgcgctggaaattccgtctttcattcctttactcggtgcgtgagcgtaaaacctatgttgtatttatggtatttgtggctgagccaagttgcagtggctctgttctctacgttgaacatacagaggcatgtgtcctgtgtcctaaaatagagaatagttgtagatatcgttgcagtattagtgtgtagtttatagttctaggctataactagcactgccagtcatgacgcacaatgtacatctgatagcgttggttgggtcagattagtcccaaaaagtcagactagggcttagagttgattgtgatcacaacgatagcgagtcgcctattgttcatcgccccacgctgaaacaatgaactgtcggcggccaatgtcaaaaattgatacatagcagggtagtgatttagaagtgacttcattttgcttatgttggaggacactacttcattatgcggcttcaattcctaacgtgttgtacacagccgctgcgcatcccacgatttcttacgagtgcttggtaataactatcctatttttattactctgtacgaaaatcttcatcccactcgagctattgacggccagcaagttgcggtctgcaaattctctatttttttctagcccgaaatggcggttgctgcccagcgacgcagcggtaaagcctgtgcatgacccgtgatgtcgcccaagatggcagtgcgaagtggatgtgtgtgtaaaagatatacagatggggctcattggccttttttgccatggcaacgtgttcgtatatgttacatagtacatagtatagagtacggagtacagagtaataatatctaaactgtttggagccttggaggttagtggagtctgaaccactggacgagacgggatgggccgccgtgacacctgggatgccgtcggtccaaccatggaaccgacaattcatacatccatgcctacacctggtacaacataagtacttacatcggtcccggggtgattaccactattagaggatattgcttcatatgctcgagataaggtatcattctcccgtatacagtattctctattttgctgcaactaatgatggcgttcatgcagatgaactgacggggcatggaaaatgtaagcccagttctggaagtcgagcacatggtttgcgctcatccaacccaaccatgacacgccagctgatggaggggtgatctaatcagtttcagcgccagacatatacaaggcagccagtaagatctatcatggaatgacgctatgtcttagtggcaacagtcacgccagtttttttctttacctcagagtgactcagtccaacaagagcgagaaaaaaaaaaacctcgctatgcagctgccttgagactggcaaagttaaagacaccgaggaaaatgcagttgtccgctgcccgatctaactgaggggctatcagccaagcggttagcatagcgtccaatggaagcatcttcatctggactagcttgaggggtagagacatcgagacttcttcatggtactttaggttatggtggattcacgagtgtcgtagaatgtaccagttcctcctagagtagtgatcgtatttccaaggttgccacataaagttgagtcataatatgtgatggctgagctcgagcgcaaggtataaaagagacggattatcacccagaagaaggaatagtagacctaaattagaggaaatgaatagaataccttgaaactcgtgaatttcaatacccgtaagaaagaaacctaacgccacagccacgacgccagctcacacgcgccggctactcgctgattggccagcgcaaatatcgccggcgctgacattgggatccatctgtcttttccctttcatcgggtcgaattttttccctctccactctccccactgaattcaaagccattacaccttctggagcggatctctgctctttgttttcctcaatccccttttatcaataggagatcttgggtcctaggatcccctaaacgcactctctctcttttcctcggattgaccgaagaacgttcaaatgctctctcagcacattcagttccaatcctcctcttttcgatccaaaaccgtaccacggtgacggtcctatcaaaaaaatcctatctggcctgcagtcttaaagtcggcgtcgattattgtttgggtgcacgatatcctgtataatatactcggtgttctttttttttcttgctgatttcatttaattgcctttggattgtttgcattttcggcttgtcgcctcccatttacatttatctgatcgactggtgctccatatgctcgtgcgataatgtatcattactccagtccaccacccgggtggtcaacctacgactacacccaaactcaatcacctcccacctcacctcaatacgcctactacgcctctcagttcgccaacgcctacacttcaccccgcgggacctcgcgacgacacaaccgcaaagccagctactcaaccaccaaagaaacaccatggtattcgtcgggccacccacaaggctactatgaagcaactccagactatggcattccatcgcgaaagcacgatcatgtaagtgcttcttttgcgggaaagcccaaacaccaccgatactcctcgaccggtcaccctacgggggatggcctcggcaacggataccacccgtcgcaatcgcaggctcgtcccatcttcgtagatgtggtcgacgaagcattcgatgtcccgcgcacccacgttcgcgaaccccgtaccggtcgccgtcccccggcctcgaaccccactcgagatggccctggccagcaccgtcgcactacctcgacctcttaccgcaaatcaaatccagctgattctcacttttacttcactcaggctcctaacggcgaggatatcgatgcggccagacgttcccataccaggcgccaatctacatcaactcgcactcccaacaaacccaaaccaccgcctgcttctgccaaaccgccacccaccgccaccgaagatgacgccgaggccgcagggatccctccaggatattcgatcaaaaactgggaccccaccgaggcgccgatcatcttgctcggtagtgtgtttgatgcgaactccctcggcaaatggatctacgactggactgtcttttatcatggcgcatcgacgcccatggccgacgtcgcgggcgacttgtggctattgttgatcaagctggcgggcaaagtaaagagggctgatgaatgtctccctcgcatccatcgcgtggaggcgcaggaagtcgtcgaagacttccttgaaagtggcgagcgcctctggtcccgattcaagaagctcctcaagggctgcgaactttacatgtggaaggccgccaaacgagaaggtggcaaagggcccgtatcaatgggccgcaatgcaggttgcgaatttgtcgaatcgattttcggtcgcgaccgtgagcttgaaagtaccgagaagctcatgaatagtattcgactctggaatatgcggttcgacgccaactgcgaagacattctccgccgaccgtcggctgcatagaatgttttcttcatacgttttattttttttttcactagcgactgccaagggagcgatacccccaaagagacagattttcctaatactgcttttcttatctacatttggagcatttgacacttgttgaatcgcatttggagcgtgttgctttggcttcggctggctttgctcgtcgcatttactgtttgttttttcgacccatgggcagatgttgcccagggtacaacacaaaagatcattgttattgttttgctttgcttttctggtgccggcgccttgatttgacctcgtttctttcataggacggcgcccgttttatccattctacttcattcctggcgtccttgtttaatctttcaattccggccgtcaagttcgttctgtcttgccgttgaagtccgtgtcactctgctttgatgataccatcttgcgatttcttatatacgtgcttttctactcttgtctcttatttcctttgtccttcgcattacagctgttatccagctatttttctgtccttaatgcttgatttgatgttgggtcggaggaaccgggttgtacatagaaccaacacgacccaaacgtccgatagaccaaccctaacgctcgttatacttttctattctatactttccgagatactccgtaacatgtaaaatgaatactatttccacgtagcccaaatccaccaccaaatagcctgtgatgtgatgtgatgtgatagccctagagctacccctcaccccggcgcttcctgtgcaatgcaagtacgtacatcgcacattgtggatcactaccccgccctgtaagaccatcgaaagcgtctagaatcaccccgggggccgccgttggttgctcggcttggatactaaatagctatttgatcattcactggctgtacgccctccaaatcaggtactatatctccaatgacggcagctgatgtcacgtttcatataagtgtaggtcccagcgttggatcagcttgcatttttctcatgcaggtgatcgcagctgctattggcttagatttcgaaatccaaccgctgcatgcacggtggttggcggtacccgagggtgtggcggccctatcacaggtgaggcacgggagtgtgggggttgcgtgcatgacttgtggctttggtcttgggttgcatggtgatcctggatttgaggtgttatttagaatgaacggtggctgttactatttatagttatggtggttgatattgaggtatctggtttagtatgaatgtaggctttgggggatttgatactcttgctgggtatatgtgagcagcagttcttggcttctatactgaattagtcttggcttggacttggcttagacttggctgacttggttaataaatctcccccttggtttggagtcatactgtgcttgtgacacgtggctccgaaggttgaactgtagaaagcagccgagcagctataccatatggaaactcctgggagttgacatgacatggaaagctcatgacagtctgccatggtataaaagcataaacttagcaatacttcatagccaagaccatggaggtggattccaagtccatgtggccatgcaaccttatttgccatatcagacctattttctctcagacttgttcaaaataacttctagaatcaaatttctgcccaggtgtgttgttaactgaggtctggaataatgatgacgcacgtgggacggtcacgggactgccagctgactgatcgttgaaatcatccattccaaggttttctttgtgaagtgatgttgtagtgctcgaaccatcgaattaagatgattaggtgatatattattatttcgagttgatatttttcggagaattgcttgggggtcaacaactaccaagactcatactcgtcttctccgctgtcctgatgcaatctcccaaggacagatgaggatgtgactcttcaagattcccttaactcaaatatctagctcctggcaatttacctgattccaagtatccgaaggatttggcctcagacctataagggtcattcgacttcccgatctgggcacatggctatgctagatgaatatctacgacagttgcgatgcctacagacgaaaagtctgataggctatcaccatgggaatggatccggagtcagattcacatgaggccacctgaagatgacgaaccgcagtggtggtggattgcgtccacgaccatcccgctaattgctgctacaacgggaccactcgccaacgttatgtcaatcgttgcgctcgttatgccatggcgaagcaaaatcctctcggaaaatcaaagtgctgctggaaacttcattcaagaaggatatccagatcctcattggtgagtacgggcgagagggcgttactttggatcggattgtctaacatcacgaatagggccactgttctaaatgccgtttcgcttttctgcggaatcgtgggcaatgcatttttactgttcaatttcacacagattgtacgctatattatagccttgcccgtgacgatcatttcgtggttcctagctgcgggaatcgtgagtaacttctctagttttgtatgtcccagacctaacgctcttttgtagctctgtggaattaccatagccatgcatatatatgctcctccagtaggcgctgatagggtctactcgcaggcgtattggagtgccgtcattgcggcagtcctctattttctcttgggcgtcctcttgatgatcaacatgctaggctatttcctgggtaaatacccgcaacatttctcgctgaccaatgagcaacgaaccttgatcctacaaatgactgcattgatggtttggctattaattggcgcggctatctttcaacgggtgatcgggatctctttcgccgatgcattgttcttctccgatgtcactgttctcaccttggggtatggcaacataatttccaccaatgccgttggtcgaggtcttatttggccatacgcagtcattggaattatcattctggggctggttgtggaaagtacctttaaatatggtcgtgaggttcactacgataatgtgatttggaaacacatcgaaaagaaacggcaatccactttcgaacaatcactcatcaacgagctcgagtctgctaaagataaactctcgcctagcggagttatcacccctccaggtctcacccgccaaaactccaagactcgacgccatcggcatcaccggccaatccgcaacaccatcaacgctatagccacggctcgccgacccaagattctcattatgcgtgaagaaaaggatcggtttgatgctatgcgccgtattcagttcgatactatgcgtttccgtcgctggaacaatttgatcatgagcgtcgttgcattcggaattgtgtggtcctgcggagcagtggtgttctggaaattagaggacattacctactttgaatcactctacttctgcttcacctctctgttgacgatcggctacggtgatatcacaccgcagtcaaatccaggaagacctttctttgtggtatggtctctaatcgccatcccaatcatgaccatgcttatttccgagatgagcgacacagtcgtcgctagcttcaaacgcgccactgaagtagtcgctgattacgtcgtgcttccccaatcccatgtctataagtcatccttgggtcggattcctatcgtttcccagttcttgctggctcgccaagcgaaaaagcaacgaagacgcggtttcccccttgagggggatgatggatccgacactggggaaagagcgaaccccgaggattctagtcaacctaatattgaaagcggtaacttggccgagtctcatccgcaccgatcccttgaagaacttgtccgggatccgaccccactcgagcttgcccagcaacttgccttcgctattcgccgcgcgtcgaaacaagcactggaacgcaagagaaagcgatattcctacgaagaatgggtcgaattcactcggctcattcagttcacagacccgcgagctcggcgaccatcgtcacagagaaaccagccagcaagtgaggaaggcccttctaatagtgaagacgaatatggaattctcaattgggactggattggtgaaaacagtcccatgctggcaaaacagacagagcccgagtgggttctagatcggttgtgtgaaagcctgattcggtacgtgtcgactcaagagagtcgggctgtgggaggtggtgcagatttgtcggaggagccaactctgaggaaggagagggatattgggttggaggagtgattttctgttttattgttgtccacgggtacatattgcttgtattaattcaatgttagcacaggccccagggaacatattcttccaaaagaggaagtgggtcaaggtcacatgttggtgcctggatatttgtgtctgcctggagatcatggccacaccacgcagatagttaagagaaggtgtctacatacacgtaccgactgcacagctatatgctagatgcaccctccatccacacattgacatgtcttccttcatcaggccaagccacagtcatcatcaggcttagtagagtccccacatacgtggcgtggggctgtgtacatccgtccattcaactacactctgtcttacatctgccagcttatatcaacaaacaatatttctcccttcgctaataaaacccccatcaaatatgacagccaacatccctgaaatcctcctactatgcatggacatcgacttcataacagccttcaacgatgcgcttaaaacaacctggccagatcacaacccagaaaaactaaagatcaccccaataaacgagcgcctcaactccctcccagaagcaacaacctttgacctaatcgtctcgccagcaaactcctacggccgcctcgacggagccttcgaccacgccatctcaatgaccttcagcccgcgaaaggactaccacgctctgacacgcgcagcgcaaaaagtgctatatgagaaatggcgcggctttgcgccacccgggtcgtgcacacttgccgagttcccggatgacctaaagcagaataaatacggctgtggatgggtggctatttgtccgacaatgcgtgagcctggagatgcccgctgggaccgggaggttgtctatgagtgtgtgtggagcttgttgtgtcaggtcgaggggcataatcgctctgcggaggagaaggagaagattgggcggattcttatgacgccgttggctgctgggattgggaaggttagtaaggagcgctgggcggtacagacagtgctcgcgctgagacaatttgttgacgctattgagaggcctgcgaggtggggtaatttggggtgggagcatattgacgaggattgtctggaagttgagaggacttggacgttgtgagttgtggttttgactggccaagattcctatgggatggtgttgggaaatgcgtgtcaataagataactagctttgaagatatcccagagctatatctctcccactgtgcttctgtaagcgagccattccttcggttcggtccattttagctttcaatttgtctctaacattgcagtggagcggatggggttcgagggcgaagaatgcggctgcgtttcgctttcggtagtggtagcattgagagatacacaaaaggttacagttctgttgtgttgtcaagaggtgggattgagtttactacattcctatgtctcagtggccatttcgtactattgtctacataggtatgcatgtctttttgatacttccactttccctggccactatttaacaccaaagtatcacaatatttacccgccaaaaaggaggctctagccattccaacactttgccacagctctacggagtacataatagcccattctttatcaatcattgatcgacccaggcaaaactgccacggagcggggcgaacccacgcttggaatgtggcaaccaggcaagagaatcttggtacgccatgttttgcccgtttggtgaagaagctgtgttgttttcgtggtatgcagtatgcaatccagtgctggaaggatctgatacatttcagagcgcgggtacttgcaggatggggtattggcagcatttcccatgcgaggatcccttcctgtcaggatacgatggctgatttttttcgatcagatagaatgtcgagtcagcggagtttaaagtaaacactagtgtcttctacctaacttggtgtgtgcagatcagaggtttcacagcatacttgggaatttttgccttaagcgcataaagcgcccgtttttttttacttctgtaggaattacattctgtgtggacctcactcacagctcatatttagtgcaggaagcccgctaagatggagaaatacatacacccactggccaagaatcaaatacttgacctcacccccaagttgtacctagaccaacaacacacataagatgacaatccaattcccaatcatgccattcgactatttccaacccagcccagccaagaaatttgtctctctcaccaagcactcccgggtgactggggcaaaagtcaacacggtgtttcacgagctcaagccacttcagccagacgacttgatcggcgaatgggacggatatatccttgccacgggtcacccattcgagcacgagctggacacgctaaattggttcggcaatacattttattccaccgacgacgtggcaccactgatggttgcgcggaacggggaacgggtgccctttgaagattgggggcgtgcatccgtaagtcatttttctttaatttgtgacacatttccaatgctgcatggctatatgcacgtgtggttgtggttctcgaaggaagcttgtatgtattttgactcgggagatcaggtctgacattcttttcttgacagctacgtgaaatcaaatatcatggagttgtctctgcagctttgatttacgacgagcgacccatgatggtctattatcgagctgtgaagcataacatggtggctggatgtattgagagtaaaaagtggcaggggaaagtctacttctatttgacgagataagtagattgttatatttagtatgtagtccacaagtgttggcttgagtagggatattgcgtctattgcttgagcgtgattgtataactatatcagatttatgaagtggttcctcgccacggcagtctgctgttgaagattcaacctttgccaagcagcttggctacttttatttggccatatcagactgcataatgtaatgcagaccacccagatgtatcagtctggttcggatcgtacaccttctctaggagagcttttatattttcgcaatcaccattagcgacagcttttctgaactctgccgataattgattcatcccatccggtatagtcaggtgtcttcaattcactccgacgtttcctatattgcggatttggtaacccatttctcatgtccttgatcatgctctgggcactctgcatgtagtaaccaagccgttaatgggaggggaaggacaagtcaggatttatgggcgtgcagaatattcagggagcattcaagtgaataatgggccgaaggccctgaagagtaagcggcaagagggacttcgaacgaatgataaataaaatcatacaatagtgaggattcgctggtggtcaccgttcttacaccgtcatttaaaccacctatcacctaactagttaaggagcgcaagtttacatcatcgtgagtccaagattggaattcgcgatttttcctttgcatgttttacccaacaactcgcgaagaaatcagagttctatatcatggcgatccattttgtctacaatggactagaaaactttttaaatgtctcaaggggccaaaagctttgcgccgagcaggccggattcgattgattggcattttcagaagtcgagcataacttctccgggaggggatcgctaagaaaatggaccaattactgatagtcatggtggtagttacctaggtaattggatctaaggcggccattgcgaccacatctagatccatggatgtatccatggggttcaacctatccccacatcataattcactctacgcaaaactcatcgctgtccaaccactatcttcgaattgttacaatgaaggctcagacagggctagaagtaacccttctttcctcgtctaatagtctttccaatgttcggccaagtgaccttgagtcgttgatcgatgaagcgattcagacctgatgggacgcgcttgatcatcagagtcaaaggacaagcaaactttctcatctagatcctcccaaccgtcgacttatctccatttgactcagacgatgccatcaggcagtgtcgcgactttctcgtcgatgacaagcgatcaacactgtccattgtctttaagggttcgggactcactgcttcacggaacgacgaggacattactggaaaaggcccataccttcttgtggctacaaggttcatggggcttactgctcaatctacccggctcccattcagtagagaagacttgatgaacgtgcagcccgtataattatgcaatatatatgacacgccagtataaaaggtacctcgatatgagattatttggggcatctaccttttatatgagcatagatacctaattcttacaatttctgtttagtgggaccggaccgcgggacccaaagtcacctggacagtcaaaaactaaggggcaaatcagtcacaaggcacattccgacactagcaagaaatactgtttgaccggatggaaaagagaatcacctctacaatatacacaccgaggaatacatcaatcgctcaatgggcactcattttggcttacggtgagcgatatcatcttggtacaccgctagatatgcctgggattgaccttgtactataatcgcagagccgggattgcgctattatcatcagtcccggtctggagcagacgggtaatataaagaggatgtggttggctgtccttaattcagccctatccgatactacgccagtgctctccactattgcgtgctgactatttatttgttacgactttgagctcccaggcagcagaatacaagggggtcattagttgcaagatttgcaatatcatatcaagttcgccctgaagcagtcggctattctacctgtctacttgtttacgtgcagatcgaaaaaagacagtcggatcacaaacgccgaggaattaacttttccccctcggaaagtcgcctcgtgccgaccacaggaacgcgaaaattctgtcaggctttcacctgcgaacatctatcttttaccctatacgcacgacggagtacactttcatactcgtggccattcagaccctgtcaaaatggagaagacagacgccgcggctacacccgatctcgaagccccagacgtccctgccagagaatccagcctcgcccaacgatggaagcagaacctgacgcccactcacgcagactttgtctgtctgctcctcactttcctcaccggtctatgcgatagcagcgcctacaatgcgtggtcctgcttcctcggaatgcaaaccggtacgagtcatacccgccgctcccccgcaaagggggcgcaaaccccaaaccaacaaaaaaaaaaaaaacaaaaaacaaaaaacatccggaaacacaatagaaactaacaatcgctcctcaaaacaggaaacaccatcttcctcggcctcggcgcctccaatcaaccaactaacaagccatggggctggctcaagtccctcgtctcgatcgcgtccttcttcttcggctcgatgatcttctcgctcgcgatgcgcaccgtcggcgccctccgccgtggaaccctcttcatctcattcctcgtgcagaccctgctcatcatcatcgccgtcgccctaatcgaagccgatatcatcccccacacctcccatgacgccaccctatccggtggcccgctgttcctcgagttgatcccgatcgccctgctggctttccaatccgctggtggaatgacgtgcagtcgtgcgctgggctacaatgagatcccgaccgtggtcttgacgagtgtctactttgatattgcgtccgatccaaagatcaccgataagccgacgacgaacgttaagcgcaaccgtcgtgttgccggcgttgtgtgtctcctggtcggtgctattgtcggcggctggctgagtcgtagcagtggtggtatgcaatctgcgctatggatggctgctggtttgaaattcgttgctgcgattgcgtggttgttctggaaggctgcgccggcgaaatagattcgcacggctgttcagtgagttaccttgttctggtgttgtagaggtcgagtagattacaatttatagttagttgtgcatatatcaatgttaatagtttctgatcctggtgttctcgtgtctttggtattattcactctctctcaacgtccaatgtacttgatgtattatgttcaacaatgtctagacttcttcctggatatgcgggtggctgtattggctgttatcctagtggctacagtggtggatcaattcgatcccggagatgttgatgtcgccctggtaatggcgatgaccttcaatggtgttttgatgcagcttatcaaagattggatgaatatggaggcatcaatcagggctgtgtgccgagtgaaggtatattctgactcgatggaatctttagaatgaacactaacaatccatttttgcagtgttgaaacgaggccgagaatatcatgcaatgcaagaagtcatcaacagattcaacgctgagtttctgactcatactgtcttaacagttgtgcatcggttgaggttgatcaaccatcctgtgcatagtagatccgttttaaattccacaactgccattcagcattgttctcagtattttgaatcctgttccatatcgttgcccaatgcgcttctggtttgataatggcaattttttacatatcgtgagattcaaactagtcatgagttataaaggagacaaggtacatatgagccccgctacaggccaaacagtccaccgagtatgatacatagcgacagaaaatcgactcgtagcattagagagatcaagtaagagattagcagaccttcaggccatgaatgaccatactaaaaataataaagggattccctttcttaactcaagtgggcttgtgaatagttaatgttggtgagagaaggttatgtgacgcatgatcaggtacaaaatgcaaacccttccttgacgacggaagatgcgtatgcaatccaatacccgaataaggaattccgtgtcttgaaggttttggaaaccagtcatgcgattactaagtgttctggggattttgccgtggttgcccgccagactcacggctaaatgttttgccggagatatccccagcttcaccaacacccggagccccgcaaatacatgtacatgtacggagcagtatgtacatacatatcggatttgaggccgaggtcgatgaatttccctttgcgtttagtgctcatccccgctttttgacaactgtgaatttcccgcgagcgacgtcaccacctgagcagcctcgtcctactcccgaggtcattgagcagcacttcctaggctgattactccattggcttgggaactttctcactgcacctcttttttctataaacatagagcgatacttacagcggtctcgtacgctctggtttcaatgttagccttctctggatatggcggggaaggtgggggtggggacgggtttagatggggattgtcgccatcttcaggaacagccgttggacagtgggcacagtatagccgagggtaacttctacatcgatgtttttcggaagtgggcgactttggatggggactttctaggtgcaagagcgatggaaaaagcatggctgaagtgctctaccccagctcattccgaagactgttgggcgagaagttctaccacgaattggatctcagcatctctgttcctctgaagctacgtttgacatcatagatcatatgagaagttgaaaactaatgtgacaacataatatccaatcggttgtagatggctatagcaggtggcgaggcatttataacggcaatagacggatttcgatatccacttcaaacttacttggtcttcaactatttcttcaagaatcgtatcgcatatataaaagatagcgttgatctttcgagataagtcacaaaagtatattctcaaatactcttattcaagttcaaaatgactgtcaccacaaacggaaccaccttttcccacatctctatcaagcctttgcaccggactttcggtgccgaggtcagtggtgtggacttttcggctcccttgacggatgaagtcttcaaggagatacatcaagctataacaaaggtatgccccacattgctagcttccattatgcggtcttcgaattgacagtgtggttacaacgcagtatggtgtcctcgtcttccgcaacaccggtctcacagatgaggggcatatcgatttttctaagaaattcggagagttggacgacgtgaagccatatatcagcgctggtcggaaacaccgtctcaaatacgcagagctcttcgatgtcagcaatgttgaggccgatgggaccatccttgaccccacaagcccacgttcccaagcaaacaaggtaaatatctagataatgatcgaaagaaatatctctgcataacagttctgaccatcacgggtacacagggtaatgacctcttccatgtggactcaagctttaaccctcgccgggccggatactcccttctcctagcacacgagctgccacctagtggcatgggtggccacactgcctttgcagacacgaggacggcattcgacgatctctcgccggagcttaaggagcagctattggccaagaactacattgcttgccactctatgcaccactctcgcaaaaaggccgcccccgaggcctttgccgggatcaacccgctcgattaccctatgggacggcaccaattggtgcagcgccacgaggcatccggtcgtatgaatttgtaccttgcggcccacattcaccatattgaagaccttactcccgaggaatcacaggcgttgtttgaccagctgttcaagtacgcaactcgcaatgagaataccttggagattgagtgggagcaaccgggcgatctggttctttgggataatacttgcactatgcaccgggctgttggagggcctttcgttcggaaatacaagcgcgacatgagacggacgaccgttcacgattcaagctcgacggcttggggattgaatgagcacactgatgtgaggcaaggacttccttgaactgttgaaaatgtagcgctgggatatccatggcttgtatgaatcattgtgatgttttatatgttgatgaagtcactcttttttgtgttttactctgtattttctgaacattaagtcattttgagacataaattgaataccaattgtttcgcttcgtcctattatgccttgtcataattatagtttttaattaatgcttccattcttgcacaatttgcaaggttcaacagttgcagcatacagaatctacgtgtatggagacgaatcaacctaccgcacgagactgaaatatgatgttctttattctagcaattatagaatgctgctaatactcagcgcgatcctagaaacttagaacgatgcataaaccattcaatgcaaaaccgcctattctatcataacaattggccatgacgattaattgaatttgactacaaagcaccgactcagcgccatataagacagctatacattgcgaagcgaagcgcataacatttaggaggggcccttgctgagccactatacctagaaaaagttgctaactacgcccccgtgtatactgattatttcctgacagttgaaacaagggtctgaaaccctcttccatgtctctccacggagagaatcctcgtattgtgcaggccgcaggtctttacactgcaagtaaattccgtgaacgttgcggtttcctatgctccagcttccgagaaaatgaacccaagggtaagtttccgcgcagttcccgatcttttgtgttaatatccttgttgtgctcacgcgccggggttttctggtatgaccatccccgcagcgtgagttgttcgcctgcaacaagtctgtataaaggaggcgatctttggctttctgagtcttggtgggactgtgataaacacgacggagttagtcgagaattgtgttgaaatcatacacgctggaatcgtgtgcgatagcgagctggggtaggaccatggcctgaacttggcttgcgagttgaggtagacgcaataggtctgggcggtagaatctccgatggctggttcatcgattgtaagctttgcacgatagcggcatttcatgtatcgtattgcttgaggcaaggagagatgaagaaggatggattctctactacaattgagatcgagcttgtttaatagccatgtgaagcctgacaaaccagacatcagcatttgatcggcacgtaacctccacagtatctcactgactgaccggtgaatttctctggatctagaagtgaagactttggacatcttgcttgaggggtaggcaaatgttgaacctgaccctggagagccgttgaaggttttggatctcgcctcgaaggttgtcaatggtagtaacatgccaggtcttgcaaggaagagtgcatcgaattcaaaataactaagatagtaagaaagaagaagcgagctgtataacgggaagcaaccagtcaatatagctgaccactttgcaaacgtttcggcaatgtgagataagattaaagctaagttctaaactataaaatccgacagtgtcaattcgcctcattcagagaagctcaaacctctaccacgaagctaattgcgaggactaagtagaaatatttggaagttatggaccaacctaggtcttaagactataagttacagttttcataacgctgatgcaagtcatctaagataaagagttgcgccatttactccaataccaagtactgatgacttatgagaaaggaagccatgttgtattgtgtgtgtgtgtgtgtgtgtgtttcctaagagagagaaaagaaggaagattgaacaaggtgggggagcagttcctatcaacctaagaaacggtcttaacaagtacacgactttaaatctaacacgacacgaccttgcaacttgccgcccttcatctccgcaaagacatcattgatgttctgcaccgtctcaacacggaaaggagttgagactacccgttttgccatagccagggtttccattgcctctcgacggttgccaacagtgcttccaacaatggccagttgcttaccgaccatcgcgtgaggataagcgccggcaatcggctgtggatcacccggaacacctacgcacaccagtgttccattgaacctgagatatgatagggcttccgcatatgcagcgttgcttgcgctgcaaatgacggccgctgaagcgccaagcccaccagtaatggccattatttcgtcagcaatgctcttgcttccatcatcgaggaacttggtgacatcgatgaaagcttcggcaccacactcctttacaaaagattccttggctcctatatccaaaccgatgattctgaatcccatgcctcggcttccgagctgcactcccaggtgacctagaccaccgccggctccagtaattaccacccaatccccggcctgggctctgctcttcttgagggctgagtaaaccgtaacaccgccgcaaagaagcggtgcagccacctcacttgccaacccctccgggatcggcgtcacatagtgggcaggagccagagcgtattcctggaatgtaccggggcatgtatagcccgagatttcggagttcgcgcagatgccgtcggcgccagccaagcaaggcatgcagttgccacaggcggaggcaacccatttgatgccaacacggtcaccaatcttcactccggaaacctcacatgacggtcctagctgggcgatgatgccgacgccttcgtggccgccaacctgtccgctttttacaggctctggaagccagctccactaatgaacgagattcagtcaggcaaagcatcccacgaaatttctgtgaagaaagattggtcttactgtttttgtcatgaggctgagatccgaatggcatactccggagtgagtactggcttgatgtcagtgatattcaataacgccaatgagtccaacttacatcttgacgaggacttgcccagggcctggggttggagtatccaactccaccaggcgagtggagatctcgcccgggttgtcatagatcaagcctttgtgggttttggggacttccatggtgagaaatgtagacttcggagaggataatagtagctaacgaaggaccttggtggtgtgaattgggaagaattgggaattggttgttctttgttttatagatgagttccgttcgggacccacccccgcaatcctggggaatccgagcttcgtggccatctgtttccatctccagccgtcctcgaatgtccgcgttcacatggccatccgtacctacgtgtcggctatagatggcgcgcatactaacgggcgcaattcgaaattccgctatgagcgaggattgcggggcgatctattgggatctttggaatagataaatacggcaccatcacagcaaaagcgcacatttatcaccccaagccatatcgcacaaccccttacgaccaagtcaaaaagaacccagtcatacacgatggccgactcaaccctaaacttcgaaaccttcttcaacatagtcaatggcgagagccgagtctccgataccacgacattcagcgttgatccttccacggaatccaagctatggagtgtgcccgtggcctccaagaatgacgtggaagatgctgttcgctctgccaatgaagcattcaagtcctggtctacgacaccctttgaggagcgagtgggcaagctcgttcagtggagacagctttacgagccatacattgaggatttcaccaagctactaatggcagagtgtggcaaaccccgtggcgtagcagccggcgaggcgaacgaagttcttgctctgtttgatcacaacgtgcagcttcgcattccggaagagaggctcgaagacgagagccgcatcgcaatcactcgtcatgtccctgttggagtcgtcgctgctatctgcccatggaatttccctctcgtcttgtctattggaaagatcctgccagctttgctgaccggatgtacgatcattgtcaagccgtcgcccttcacgccgtactcggcactcaaatttgttgaactggcgcagcaaatcttgcctcccggcgtcgtccaagccattggtggcgaggactctattggcccagcgctggttcagcaccccaatgtcaacaagatttcattcacgggatccagtgcaactggaaagagaatcatggcttccgcagccgcgacactgaaacgtgtgactcttgaactgtgcgtataattccctcgcacggcactcgaagaatatcctgctcacacacaagattttctaggggaggaaatgatccagcaattgtctaccctgatgtggacatcgaaaaaactgcccctgaagtggccatggggtgcttcgtcttctgcggtcaagtttgcgtcgccaccaagagagtatacgtccacgaaagcatttacgagccattcctgaaggctatggtggatgcggtctctcaaatggaggtgggcaaggctgacagccctagcactgtactgggtccgatgcagaacaaaatgcagtatgacaaagtccaggacctggttgccgataccaaagcccagggctacaaattcgctctcgctccgcgtgcgatagaaggaaaaggctactacatctctccaagcattgtggacaatcctcctccgaccgcacgaatcgttgtggaagagcaatttggttcgttgatcagtcccatgggaaaaaatgaacatactaattctgctgtgtttaggtccaattgtgccagtcctcaaatggtccgatgaaaatgatgttatcgctcgcgccaacggaacgacttcgggccttggcgcatccgtgtggagtggagatgcttcccgagccgagaaagtagccaagcaaatgcaggctggaagtgtctttgtgaattcctgggcgaaaaccacgcctcgggcgatgttgtctgggcacaaagagagtggaatcggcggtgaatggggctctacagggttccttgagtactgtaacacgcaagttgtgcacttattcaagtgagttcaggggttttaactagtgtttcgatgagtaattagctcggcatagccacaatccatagtataggaatagcctctgtcattgaaaagggtatgatctagttggctcaatagtagtctttttagtagtctttttagggttctctttgtgtacatatatcttctccccatcccaagttttgtaggtactagacagaaaaggatggaaaagggtttaatttgtgaaaaccacttttttgtggaataccgaactaggaatatcgcccccttagaccctaggcaggaaccgaggtctttgttacggtctggtaggaatatatattccacatataagcttggacatacgcatgtgacgtatagagtcccgtctattaccgaaccccacagattttgcggatgcggggttaatccggggaataaatccctttttcaaccctttctgcttcctactccttgctatctgtaaatctcatgcacaatgactcgtagccaaaatctccgtgtctatcgcgcgtgtcagcggtgtcgtcagcggaaactcaaatgtgatccgtgagttgtacacctcagtcaacctccgctctcactaacatttttcaggtccaacttgtccgaagggacaaaaccttcttgcgtacagtgcctccgttctagcaatgagtgcatgcccgccgggtcacggcgcggaggcgacttctcacggtttcgacgtccatacggggaccgaagctctacgccaacgcgggctaatataggccacggactgcatgacgaacaaaatagagacgacgaaaaagtaatggatgatcccatctacgctgagttaacaaatccgggtgatgcgctccagatccttgcccaactcgccgcgaacgactcccaggttcccaatcaccctaatgactctacgaccttcgatcctttcccggtgactccatccacgaagcgaggggggacggataccgctttcaatattaatggtccgatcgagtcgattcagcctcctgtgttacagtcgacattgtctgagacagagacattggtgatcggtgtgttaggcacagatactgtttgccgtctaatacatcagtatgaggccctttatattccgtgtgcgatttcccttctgacactttctagctacgcagcaaattaccacactttttgtcccctcgccccgaaacggcttctggcaacaacggatccgcgcaaggcggcagtagatgagccgttcctgctgacagtgcttctgaccatcgcatccaaagacgagcccgcatataaggatatccaccaacattgctggaaatatctcaagcggcacatgttagatatactcctcgccacgccatctaccttaagggtcgggtctgtcgaaggtctcctgcttctctcggagtgggtgccttatatgcaactcgatacctgttcctatcctaatatgttcccgaggaacctgagtgccgtcgaggataatatggcctggtcactcatcggccaggcggtgagacattcttatctcctgcgtctagacaaggcatcctttcgggagacggctcttggggagtcgcaagaactcgagaatcgaaaccttctagcgtggatatgtgcgttctatagattcctgctggttccttatcgatactgactagcttagttgtatatatcgccgaccgacagatctccgtccgtatgggacaatcattctggtctcgtgggccatcgctctcgacgaactttacggccaatgactttccaactctacgtctcagggcagatgcagagcacaaatatgcacatgtgctacaggctactattgagctcacgcagcttcttcacaacgtgcatgacactttatacgcgtccaaggagcgaagaactcaaatggttcgaagaggagactacaatcgctacctagatgattttcggcactccatgtcggcgtggaaagaccgttgggatggtctcgagacatctcccaagctgcactgtacaatgcatatcttcaaggagtacgttcgattgtacgcaaactcattttctttccagtcacttctttccagggcagctcatcacagtcgccctgcgggagaaaaccgggcaacaacttcagggccaaagagagccccctctctgtttccacggggcatcatgtcgaccgcagagggtgcatatgtgctcgaagcagtggatgcagcccgggcgatcctgacaatagttgtccagacaatttctcaggcgcagattcgctatatgccgttccgattctacatgtacgtatcactatcaacaatacggattgtctctgggaatggctaattgatcaataggtatactgtgtactccgcggtgtttttatacaaagcggacgtctttggagccgtcgtgagcacagaacataccgaagtcgtcaacttggtgcaacattttatacaagtacttgaagaagctgccattagcgattcccatattgctagtcggtttgcaagtttgttaaagcgcatgtggctcccggacaggcagtgccattctcccaagcgcaacacatcttccaccgcttcgaactatgtaaatacgtcgtcacagcagtgcgaactcccccgaaatactgatttactcgacgacggggctcgccacgatcttgcttctagcatgcaggttcctgagcctgcacaaattcccacgccatatttcaatcttttttaccctgaattctcgactttagagtcagagctggtcgaattcggggtaggctcaactaacttcccgttttgaagccgaatatatgggtggatgttcataatttcacaggcatggaaagccaaatctgtcaccggatgacagaaataagtaactaacattgtatgggagctacctaagtagggtggtaatatcaaattctaagaaatcatgaaattgtcaactttgtagtcttagagtacgctcttagcctttgaaaccatcaaccagggtagttactagctagcacaatcaaggcagttcgattgccaccagaccgatggtggaagagggtactatccataggggggatcagacctttgtggcaaaacattatgatggcatatccatacatctagaattacctcagaacaaccatggcccacaagtatgaattgactggctcacactgagtcgacctcgggatatatcgaatcagtggcacaattagatacatctgaatggcaagtgcggagaaggacccaaggtgatggtaaatatcatcgtcatgatcaaatcattgccaccaccttcgatacacataaatacgaacggttctccctaaattctagaggatataccaaacaaaccgaaataaatcgacataataattatcaatttcttggtatgcttccactttgacccttttccttgagatgagcatcgggagttgatagtggaggaggatgcgatgctctataagaattcttactaacattatcaagacatcatgcctaaggataaaggtcagaacaagggcgagttagcttccgactccagagctaagacccacgctacggaaaaggcttcccacagcgagatggggcctaacgaacttttgagtgaacacatggactctgctggtaacccagtacctgatccaagctggggcacaaccaggccacctgaggaggatgaggatttgtttgaggctgcgaatgcagacacttcggaatttaaggattaatttgggatggaaagggggtttttgatgggcgaaagttaaataattatacaaattattcttgaatttgcaagctatctactgcaggtttcaataactacatgtgtgtctccatgtatgtttcaataggttccagtacaacataagagactaagtacatatagtggagttcgcgggctcattgctatggcaacacaagttatagacggtgacacttcgtagcgtagaaccttggaaatatcatcttgttgctcttatttgtctgttgtcgaattcaattgcaattgcaatttcaattccaatttcagcttccgttctttctttttatattacattctttccaccgaatatgactctgagctcaagtgtgtttactatgaactgaatctcccaaggaaacaacgacagtaccgaccccctccctttcactcattcctgtccacatattccctctccaatctcttattttcccctctcaaatcctcatgtaatcaatcttgcatgtaccactctcttcttgatcgacgacgcgacgccgtcaccgcttgtgtgcagctattaagcgacaacaataggaacatggcgcttgacccgcgcttctatcaacacatcggccattcgggcccaggctcgatatcttcagccgcttcatccgtcatatcggccgccacagggatcacctcacctagcattatctcgacctccgcttccgccgccaccctccgatctacagcttcaagtccttccttccgcgcgcgagacgggttcccgatatccaataccagagatgggatggccagcccggcaccagggggaaatgtgcgtgtcgtcgtgcgagtgcggaagttcttacctcgaggtaggtcttgtttgggagagctgcggggtggcgcggtaccccgaaaatagagggtgtgttctgacctcatcttgcagaaatcgatcgcaaggcagaatgtttgatttcgatggacccgcgtacgcagatgacctgcctgcaagcaccgaaaccgaaacccggcgaccaagggaaactcaagtcccacgcccgtggcaagatcttggaggataaatcttttacattcgacaactctttttggtcccatgacgaggaagatgagcattacgcacaccaggaagatgtgtataatgctctcggtgaagagttcctggatcacaactttgaaggataccacacgtgtatcttcgcatacggacagacaggttcaggaaagagttacaccatgatgggaacaccagataggcccggcttgattcctcgaacgtgtgaggatctgttccagcgcattgagaactccccttctcctgatatcagctacaacgtccgagtatcttatttcgaagtgtacaacgagcatgttcgtgatcttttggttccacgaacagatccaccgcattatctccgcattcgcgaatccccatcggagggtccatatgtcaaggatttaaccgaggtcactgcacggaattatactgaattgatgaagtttatgcgaaagggcgatgtctcacgaaccacggctagcacaaagatgaacgacacatcgtctcgatctcacgcagtctttaccatcactctcaaacagatccaccatgatttgtcaacagatgagacgactgagcgcactgctcggattcggttggtcgatttagcaggttccgagcgtgccaaatctaccgaagcaactggcgctagacttcgtgaaggtgcaaatatcaacaagtctttgactacgttagggcgtgtcattgcagcgcttgccgatcccaagaaactccgtggcccacgaaagggcaaagaactcgtaccataccgtgattccatcctgacatggctactgaaggacagtctaggcggcaactccaagactgcgatgattgcctgtatcgcacctgccgactatgaagagacactttcgactcttcgttatgcggaccaggccaagaatattcggacacgggcacgggtcaaccaagatcaaatgtcggcagctgagcgtgatcaacagattgcggagatgacagagacaattcgcgccctacaactcagcgtgagccaagcagcagtcaaccagcgcgcaagcgaggcctccgatgaaaggctcgaagagtaccagcagaaagtcgagaaaatgcaacgcctcatggaggagaataagatggtcagtgaatgcaagattcgacaactgcaaacagaaaacgacgctttgcgcatgcatttgaagctagcggttgagagtctcaaaaacccaatcccggccattaccctcgagcagcgaaaacctagcattgggtccctgcaagatgagaatcaaccgcccagtcatgacccagaagaccgtgaaggctctcctttagtatcagatgccgaatctgaaatagacgtttgggaagatgatgatacggtcaccgatgatatcaccgacgaagaggcccaacagatgcaagattacatgcatgagcttcttggtgacctgagtgtcttcaagagaaagctggccacggaccatgcccgcttccgtccaatcgaggagcatacgactcagaaacgccgcgccttaggaacccttgtcagcaatcgttaacatgtgaatacaagtttatttttatcttttgggtgtacagggattgcatggtgttggtggcgagctctttgtttgcacttccttgtttgaattaggcccagactacttttggcccgtgtacttagttctttgatagcgaaccctgcgatgaataatgagacatttgacgttatgtatgtttcaatgctagctacctcattgattgggtatcaccattctttcaggccgcattcttatatgaggctatgtccttcaatcagcagttgtaaattatttctgttcagtatctaaccgaagccaaacgagaaactgagaaaattcaacgaatatagttacgctgtttattgtatgcaatgaaccgcaagttagggctgcgccgctcagtgagccgcttatggcatcatttcattttgcgtgagtcaaccctccctcctccccaccatcttcgcagaaccacactcacacgtgaattaattcacagacaagatgacggaaccctccaattcagtgccgaccgcgcaagtcttaactcctgcctcgtcagcactagagcaatctcaacccgtgaccgaaaactctccgcagactctcccgatccgcgactcaaaacccactaaacccaccggagatgcgcccgcgtccacagacggcaccacagataagccgcttagcccagccgagttgaagaagaaagccaaggctgataaggctgcccgacgtatccgagagaaactcgataaggaaggaggcaccatcggtagtgccattcccactcctggtgtcggcgcccaggcgcgttcaccaactacgccgaagaaggatgccgctggtgctggctctgcacagaagggaccccgacctcttaccccgcgccgtggctcaggtcccctcgcgcaaactgggtccgttctcgtggagcaaaagaagaagaaggatgataagaaggttgctgtcttcggccatttgtatggacaacagcgccgtgtcactgtcgccggtgccacaaaggaagtgcaccatgccatcttggccttgggtatgcagttgatggactacactatctgcggcagcagtgcgcgctgtgtggcaacgttgattgcttttaaacgagtatgttgttgttcttctgtttcatgctggtaagacatgaccctatactgacaagtcactttctcaaggtcattgaatcttacacaacccccatgggcacctctctggctcgccacctcaccacgcacctctcgtatcaaattacctacctctcgacatgccgacccctctctatcagccagggaaatgctatccgtgccctgaagctcttcattgcaggcattgatccctctacccccgagacgagtgcgaagatctcactctgcgaatacatcgacagctttatccgggagaagattaccgtcgccgaccaggtgattgcagacagcgcagcacagaaggttcaagacggcgacgtgatcgtaacatttgccggcagcagcattgtcaagcagacacttttgttagcgcacaaccaaggcaagcggttccgtgtctcgatcattgactcaaggcctctctttgaaggcaaaagcctcgcccgcgatctcgccaagagcgggctcgacgtccaatattccctcgtccacgccatcacccacgccgtcaaggatgccacaaaggtcttcctcggcgctcacggcatgaccagtaacggcggcttgtactcccgcgtcggcaccgctcttgttgccatgtccgccaaagagcgcgccagtggcgtcgaaatccccgtcattgtctgctgtgagacgatcaaattcaccgaccgcgtcgccctcgacagcatcgtcgtcaatgaaatcgccgacgccaacgagctgctacccttgaacactcctgtctccctcgtcgttcgcgacccggcagatgcgtatgtcccccctccgcctgagaataagaagggtggaaaccgcaccccggttcccgaacctcctgttaccccgcacaagacctcttcgtcgcctctcgcgaactggcgcaacactcccaacctgcagctgctgaacatcatgtatgatgttacgcctgcggaatacgtcgacatggttattactgagatgggcagtcttcctcccagtgctgtcccgattgtccaccggatggtgacaaacctgtgatgtattgattcttcgcttttttttgcaacatggtcatgaatctggagcgtatcgaacctgtaatctaaattaaaagcaatgaaagtggttccgactgcttaggcgtcatgatttctaggtctgttttgtctttctctcttttatccttgttttccgtttggaatcctcgtgggtcagcatttgggctggttggtctgattgtatgtgtatgtttttcccatttcttacatttatttactcgttggaattttattttagaacaggatgaacagacaataaatctctttatgtacattcggctttggaatacggaatacttggttcccaatgtctataggattgcagggctatttgtacacgccatcaggacatgccgtgggaagtgtttagatgattaccccggaaatggacgcttctctatacaaactcaaaaaagcgccacaaccatagatttgcgaaaaataaaccgcagcttgcaacaatttacatacacatacgaattaaaaagacaaaaaagaaatcgacagctcagagattcgaactctggtccccgaagggactcgcttagcaggcgagcgccttaaccactcggccaaactgccaatagatgatagtttgccactcaataaaatcaatatttcataaggtcaacatttgcgctacaaagactataagttagatggtttacaggttagtggatgtcatggtagactatgaaattgtgctaataattttagggttcggagctcaggggtttatcacctatacggccgtacaatgagacttcaaccgtaacatagatatgtgagataggaaaagaaccatttatagtagtcgagtgcaacttttcaacatcaattaatctcatcacgatctctgaatggccacccctttctcagtagattaatgtcttctgtgtcaccctccgcagtagctattagggaactctcaagctcggcagacttccgaacagcctcttcgaaatgctcattgctgacccagccatcttcacttgttacttctatctgctcccgccaatgatccacaagtttgttgatattaaaccatagttgctcctattcatagaagccatccagctccgcatcggtgaatcgcacaggacaaggtattcctatatcagacaggtggggccagtaatcagccatgaggactaatgcccctttcagtgtcatcaagtttccactccattgcctgccggccctatcaacaagatgctggcgaggaaaaaggatgggatcacgaagagcttcgaggtgcgccttgttcaggtgaccgttaaagatacgatagtagtaagagatgagacggcgtcgctggagttcatcagcttcgaattttttgtcagccggaagcattccgtattccggtggaagtgatggttcttcaagatgaggggttttttctgcatctggattctcgaatgtacgggggtagcctgcgaccagcaagcgcggctcaactgtcgtatgttgtcagtcaatgatacacgaggtggcgccagaatcgggggaaacaaagatgttatttgggttcaaatctaaagatcgtcaggttttgtcagtgatgactgtcaatgagacgtacctgggtggcggagagtgggccgattaagtgaactgtcagcaacctttggaagtaggtatgatgccaatgcaatgtacttctccagaagacggaggtaatcctcgaggtcttttttcccagggaagacatcattgtgcgggaaagcaagttctcacggcttcccgtaccgctgagtccattcaatttccttctgtgcgacagataaaagataatcttgggatcgttccctgtgatgatcaaaatctgaacttcaaagtaatgaaagttacactcacatggaccacagcggagattcagaccggcccttccttcataccaaaacatataatccgcagttggaccaatgcaaaatatctccgagtcttcacatttttcagtgctcgctatatatagcacagcttgaagttcagcgggaacatctttcttgaaataaatgctcccaatagaccggaagatcccattataatcgacttggttgtcattcaataggaagttgggggagttcaacaacacaattcagacattagatgacagagcgggctagaagttttaatgtagaattaaaccactcatcgtccaagagctattgagccgaatgtctatccctaggatcaaacttcgtgatcttacgaatgaactttttgtcctcagttgagacctcgtttgttgaaatatgtcaaagggcatctgcttcccatgaagacggctcataacctgcataagcatatataacgtggaagggggtgcgatttcctgataagaaataggaaatggtccaaagaactgacattgccttgtaggaatcttatgatcatattcatcatgatcagctgagacatcgggcttgaacatgaagtagttatcgccatatatcaatgtgatgagctaataatatacgttagcagggagacaatatacgggtggttgttacacgcattgcacacataccattgtaccaaacgaccatatatcagttgaaataccccagccaattcgaagatgagcctcaggactccgccatatgggtgcccctatgagattttcatcgtacgcatacttggaagtcgcagggatagtacttccaaagtctgcaagttgcacatcagtgaagcttacgccctcaacttctgtgccgtagttcacgagaatattgtcctgtttgacatctgccacgatatagtcagattagagtctgcgcaaaagttgcggtgatcatatattgaccggtatgcacaaatccgccttgatgtagcacatctaatgcttgtaggactcgtctagcaacttatttgatttccactttgttttaagcacatatcgctcgttttctaggcgaaagtggcgaacactaatgaccactatttggccgatttgagacctttcacaattagccttttttcgtagactcgccgggctgatatccgcgcaccttgccaaccagacacagtcctgggcatgctttatagtattatacgaggtcactttgcccttcaaactctgaccaagatggaataatgcagacattttccttcgactgtcgattagttattcaggagaagaatggagcaagaaatatcgcagcaactctgggaaacaaggggcgttgaagtctcaccggctttcttatgtcttatgttggccaccgtcggggtcaagatcatctagggttaaagttaagtaagttaacatttgtcttcacaagacgagagtcacgagacaagccgagggtcttaggtagatgtcgacatgattaaaatgaggcttattgtgacgagaggctctttgtcgacgcaacgacgatcctttggtaacaagctgccggcgcagaacgtgtacagggcctggtacaatataaacaactcttctccaagcactcggacaagccgaacagttggtgaagcaccatttgggggtagtatgagcccaatgacacagtgcatctgtcatttgcagaagcgtagtcaagctactagacctcaaaatcataataagtatggtgggtggttaaaaggaatatactagtacacggaccacccacctgagctggagaaataaaagtggacctgtggcggagacccactctcggattatatataatactatatgcgaggtttatccggtggtgatgagtcttgagcacgccgcgaacccaggggaacttgtacaaagtaagtcaagagataggaccaccagtttggaaaataagtcataaactacttattgtaggtatcaaggcagatgatatcattttcgtagagcgaaaaaaaaaaaaaagccgattgatgataactgttacacctgctcattttattagggagatacgaaatcaggcatttacggtcatgtacatgtgtccaactaaccagccttggaatgtccaattaattatgtgtacagtcaatatttgatcgttctgttatatccaatcataaatgaggtttatggtcaagggcaggtcaaaggagtcagtcctatggatgtatgcactgttgtcgagatcaagagagtaaacaaaggccgtgttgtaactatatggcacttgggagcagttttgagggtgaatttcgctggctgtagatctgagatattagcctgccggtattgctggctccaaatttgctgtgtgtgattcagtaattccctggcagatatgtatatatattttatttcgagacccacatactgcacctcgtgggagtaatcgactctagaaagatatatggcaccctttcaaccacctgccaccagagaagtcggcgccgtatgcggcttttcctcgatgaaacgttctagtaatctgatccaccaccaagatgacccaagggatgttatgcttagattcttcgacaacgcctttctgtatgtatttgttggatgttaccgcgacccacctatcagtatcccagttaaaagaatgaagacaatttatctgtaggtataaaaacaaaaggaataaagattaggtggcgtaggaccaaagagatctcgacaaggcaaacgaagtccaggtacctctatccctaccgacactccggttgggagcgtattatcaagcctgtgatgatcaggtttgatgagagctgatattaattgtttagaaaatagataactacaactttgcatagtattacgacacccccattcgtcgcatcatctggaaactacctatactttcgtggaaagccctaaaatgagtatttaaatctatcgactcgaaaatgcgagaaataaccaaacacttgcttccaactgcttccaatgaagtagttaaactaactaatacttgctttattaactagttatcggtcataatgatttatctcggataaatgcaatatctatcttgttgggtggcaaattatcaccaaataggcagtttggccgagtggttaaggcgctcgcctgctaagcgagtcccttcggggaccagagttcgaatctctgagctgtcgatttctttttctttttttttttttccccctttctttgtgacacagaagacattaatctactgagaaaggggtggccattcagagatcgtgatgagattaattgatgttgaaaagttgcactcgactactataaatggttcttttcctatctcacatatctatgttacggttgaagtctcattgtacggccgtataggtgataaacccctgagctccgaaccctaaaattattagcacaatttcatagtctaccatgacatccactaacctgtaaaccatctaacttatagtctttgtagcgcaaatgttgaccttatgaaatattgattttattgagtggcaaactatcatctattggcagtttggccgagtggttaaggcgctcgcctgctaagcgagtcccttcggggaccagagttcgaatctctgagctgtcgatttctttttctttttttttttttccccctgtcttatacctatacttgaggagttattcccccttctcactttttatacatggagccatttccttcttgcgatacgtggatatgttttctaaagccatataactagtgattaccttggatgttgtcatcgaaattgcacacgtgatatgagcggtgtacccaagtgctattttgccgtcaacaaccgtcaacatgccgataaggcattgtgagcctcaacaagttcattggcaagatattctcacatctcttaagatccctgttagcggatcaaggatccctcaaaatggtaaatactgaaccctactctcgcctagaatcccctagatagtccaccaattcccaagctaacaccaaaccaccagagcaaagactcctccgcctcatacctgcacatgcatcagccgcggctagcagacctcttcgaagaatttacacgcccacacacctcaacagctaccaactcaacaacagacccacacaacgccaacagcgcctccgctgcaaatcgcgaagcagcaagcacaaatgccataccctacgggtcgacctctccctccacaatcccctcattcctgccaatagaagacatctacgtggcaccgcaataccagcccccgaaccctgaagacgaggatgatgtcgtcccagaccagcatgcggcgttcggcatcactcgcgccatggaacggagacgagaggccgtgtggcgcgatcttggtctcgaggcgcttgttaacggcgaaggatatggacctgatgctgggcctttgactggtgctggaggtgctggggctgcaacctctgggcctggggctacgctgcggggtagtgggggtggtgcggcggccgctggggcgcctgttatcagggtcagggattctgggcggaggatgggtggacgtagggttattgggttgcggtaataggcatcagtgtttactgagccttttgaagagttgtcttttattgggattgttgctgcgaaagccaggcgggtaaatggctgtcttgtgttgcattttttactggagcagattctttcgggctggatagccttgttatgatacccacgttggatgtatccttctgttgttatgatatatcttgaagatcattgattcgtttccgtttgcgatttcgttccaagaaccgccaatatcaaatggctgcagatctaacttggtctgagccttaaacgccgcgcgtaatgcgatatgattatacattcccctagatacgaatgatgtcgacccgagcccgctcgtacagtttgtggctcagttgtttctgttcgcgctcgtcctctgccaacagtcggggatggacggccatttgggcgtatgagcccgcggcgcgacgctttgatagggtgcccgggttgatgactagcacactgtcgacgacctgcagaaattataaggttagcaccatcatggaaggtggaagtaaaaattttcggctggggataacatactttcacgaaaggcggcagcatgctaggcacaattagaatatcaggccggacattccaccactcgcctagtttcatgtagggaatatccagcatagcacctgtagccatgccaccttcgaagccgggctttggaagatttgaccgtgcagtcggagggaacaaggggaagaaatggcgttgctcgatgagatacttgggcagacgggtgagcaggttaccctctgcgggtcgaccatgcaagacctcttcgcggcgaagttcggaaagcacatcgtgtgagcacattccaataacgcattcgttgaatgacaatgtggcgggattcgagacaatgcggacctgcttagggagaccaaggtccttcctggggagctgctcctggggccaggagacgtgtcggctgagtacatcgcggacagacggaaccagcacgatcgtgatgcttgggacagctgctgcaagtcgtgctagtgacgttgagatacagtgccggaacattagggacattgtagctgtgtccggatcgaggcccttgatgtctggcaggtcaaaatcgcccgatgcaagaagagggtgctcgatgtccaggaacggtcccatcagcaccagactgtcggcgtagttttcggctgccttctgacatagttcctgcagtggctcgaagtccagattgtcgtccgctgtgtagggaccggccgcaaccatgatattaagcggtgggtttgcatctccgtcaagtcgctcgttgatgccgtctagtaccatagctgaagatacggccggtggcatcaggggaattgggagcacttccttgacagtgaaatattcaccagaagggttgattcctcggagagccacgatttggcctgggaaaaagttcaccgagggtacggaatccaccttcaatgggactcgtctgccggctccggtccgacgcgaagtctcaagtacgagggatgccgggttcagttttccctcgagactgtcggaagcgatccgcccgacagcaataatctcgcttgtactctggatagctgcacttccaaatgtaatatcgtctgaattgaattctgcctggaatatagtcgcgaactcgtctatacgatcatccagaatttccgatgcttctgacaatttcatgcccatgggcttgtagccaagctttttgaggtccgtattcgctgttggcttgatgcgcgcctcggaaaatggcgccattggggttgctggctgggataagtgcgcattgagggtttctatcgtttgaccaggattcggtcgatcggagaacgaaactgctctgttcctgatgtcagcaccttcaattgaacatacacgccccgaaagtacatactgcatgccatcgccaggtgttccagttggtgtttttgtgccggcttgtgatccaaacttttcgaacttgctgacttttggtgtagcgggggaggtgaattcggccttgcgcttcgctgatccaaatccattcccagttcgagcattcgagccagttggtgtcaattgatcgaacatcccaaacatatcgccaccagctgcagccgcgccccgcggagttgctgtgtttgcagttcgtttttctgtgtgccggccggccttgtcacgactttcgcgttccaaagcttcttgaacatcttgcttgaagcctcgcactgtttgcatagtcaaggttaccccttcgcccatctttatgctgtatgattcccatttgtagaacagctcctccgcggtgatcgaatgcacccgcagtatggagaagagctcggcaaggatgtcttttgggattccatcggggaatgagcccacaaaaaactcattgagctctccctcggcatccattatggcgaggtgtgtatcgtggaagggcaatggacattgaaagtgcagacacgcgcaagacgcgtgagaccgtgtcgctgacctaagcggcccaaagcagtaatattattcgagtttgatcggagtggacctgtcgatcgcgagaattgtgattagcttgcccctaaatttattattcattctctagattcccacgtgtcattgtaaattctatatatttagatccatcaagatcatgtcgaactccgaacaaggcgctactgtgcacccgcccaccaatggcgatactgtgtccgataccaacatgcaggcatcggccgaatcagcccccgtgaacgcccaggacgagtctacttcaacctcgcagccaattgacctcgagctaccgacatccgctgccgacggtctcattcagaagcctttcggcaagccgctggacacagccaagccagtcgcacctgcgccgcttaccccggaacaacaagccaagtacgacactctgttgaagctcgtttcatcatggaccacagtcgcagacaaggccgagaagaatgccccgacatctcctataaccgaggatgagcagatgttcttgacccgcgaatgtctcctgcgctacctacgcgcgaccaagtggaacgtgtccgaggctgagacacgacttcagagcactctcacctggcgccgcgagtataacctgaagaaattgacgcctgattatatttcaatcgagaatgaaacaggcaagcaggtcattttgggctatgatatcaatggacggccatgtctgtatctcttgccctccaaccagaacacggagaagagtgaccgccagctcgagcatcttgtcttcatgctagagcgggccattgatctcatgggacctggtcaggaaactcttgctctgattgtcaacttcaaagagacgaagtctggccagaacgcaagcatcagccaggccaagcagacggtcggcttcttgcagaaccactaccctgagagacttggtcgggctctggtgatcaatggttagtgatgtcatatcccagtcaatcttatgacaagtgactaacctcctatattagtgccctttgtcatctggggattcttcaaattgatcacacccttgattgacccgaatactcgacaaaagctcaagttcaacgaggacctgcgtcaacacgtcccgcctagccaacttatgaagtccgtgggtggtgatgtcgaattccgctacgaccatgcatcctactggcctactttgaacaagctggctgaacagcgccgtgaggcgtaccgtgaacgctgggttcagggtggcaagcaggtcggcgagtttgagaactacctgaagggcgaggacgttcccaacctgtcccagaccaaacttgaggccaaggccagcgaacaagcttgatgggaagagcatattattttgcgcctattttggtgcatttgcatttttggtcaccgtttatttcatcttttctattggtcaatagccggcatttggtcacagcgttggattgattactgttggattgttttacatataccgctctgtttcgacacgcctgttcatagacatgtcaatctttgtcaataattaagcgataactagagtacccaaattatagatacctaatttcttcagtttcctgtttcctatcatacatacacatcaataaaagaagacaaaacgatagatattgatacttgattatatataggccggagttagtttggatgcaaaagtcaatcttgttgtagcacaacgatcacagtaagcaagaatagctggatgcagtcgctattatttctctagatttagatagcttctaatcttaacaccgtcttcattaaatcataagcctcatgtgcgtatcatagccgctctcttctatcagatactatactctagattaacaaagcttctccaacggattggcgctattatcattacagcatgactggccgaagaagaaatgttgcctgtagactgttgtccaacgcctttctcgggggtcattggttgaaaatggtactgttgggattacatcgtccttggtagatacttattctagcccgacgatatgtcggataggttaacccgatggtgacgtaaatgagcacataaacttctgcttgacctcttgggcaaaagcatcctcggctgctttctttttattgcgtaaaacccatgggacaaatgtaaagtggagctacaggtgagcccatgggcccacctgtgttctggatatcgcctactgtaagcaaaccatcctcaaccaatgaacatcctttggccttcgggccccagtctgattctcttccgaacaccacgcgaggatatccatgaacagtaaaaagtctaaatgtatctaatcaatcagataaaaattcaaattcctccgatgatcgagtttccatccttccatggaaagtttggtggcgctaattgttgaattaccagaataaagatatcagcagggtgcttcgggcgaagtatggcattttctcgctggagaccttgtagaccgttccgttttaatgcctactctctgtcgctttttgctcactgagtaaaacctagcatgcccttgaataccacgtgactttacagtcagcagctcagctcaatgtaaaatgcaccacgctagccccatccaatgaagtctttgaccaacacacaagcttttgtgatagggcgatgtagtcccagagataaatagagtctcgggacaaaattcttggtacaatctttgcagcgcaacatttaacaacatcgcgcatcatcgcatcataatgggggatcaagcaaacaagcgtatcatggatcaaatcccagacacaatcctcaaactcctccaagaagttgatccaagaccagttcgaatactgggtggcacccccaacagcttactcgaccctggagattatttgggatttaatacgtccatttgtgtcaaaggctcagtgttctattcacaagtgtcgtccagaagtccagactcgttttctcgctgtgaacgtataccctggaaaccctacctgatttgactttctaattataatcaggaatggaagctgcaatgctgggggcggctcagcccaagtatacaaccttaaagacgaccatgagcgagcaagaactaatatctaccaaactatagccaattccttaaagtgacacaggatcttaacgacatacccagggttcatattccttacacttttagatacagtgctgtatcaggacttcgtaattaacagtgggagcccatgacctacaataagcggtatggagtaatggaggcgatatggcaagccacagaataaatggccatagtcagaatacacgtgactaactagagcatgctcagtctgagcccgtgctgacatctacttgctgatcctgagcctgagcgccctcataaacggcggcagcctagatgggaaaggcctcaccgggcagacattatcctgtctatacgacgtatagctacatataaactggtggctaacgtcggtaagactaaagagttcggaataaaatagtctgatgcttgcatattccttatacaaagtgtcggattttacattactccgtactccgtagaggttccaacgttgacaaagtttttcactttccgaatcggttgagcgggtacactatgtcctctgtacagccaccgtattatgataagattgctatcaatcagttggatactcggtcagaattctccgggtattccccgtttccccgtagccctgtaggcccatgctttggacccctcattaatgtaattatcccgactaggttgctcaagtgagaattccggttttcggagcgcgtttagcgagacttatctgcttctaagccttgcattagaggaattatcccgactacctgagcccatgggttgaatgaatttaggaccgggcagtgcttagttaggtggggaagtacgggctacgtccacgagataccaagacctcgggagaccctgcatgaaagcttagcgccacttggtaaaattactagttcacatgtcaaaatcgatttccaatctacaaagtacaaaatgaaaccttgggagctcgcttcctcggcccaatgatcctgctctcgcccagtggaccactcgccgtaagaccccatccgatattcgaaccgcccgatctctctcgattgattaaatctgaagagccaagacaccagtgcctgcacgcttctccgaagcgggacctcttgtctcaacgggtgctaccggatcttcatagggacggcgcagaatgaaggctctcgtcttggccttggcccttgcgacgctgttcatagccgggtcaatgatcgggatagctccacgcttctcacggtagaacatcagcgcatagccaatcatgacacagatccagtataagttgtaggagatcacggagccgtaatcggccgaattggtccaaccaagaagcgcgttgaagataccccaaccgccgccacctcccagctctgggttacaacagttcacgtgccagacactctgtcggatgtcgtaggatccggcaccagagccagtctccgacgcgtcgcctccgatgatgttgttccaggcgttgttctccaagtaccacacaccacgcgagaaaagaccggcggcaacgaggtagaggaagcaagtggaaatgatcaagaagatctgcatcgaagtctgccgtccacctctatcggtatgttagcgctgtatatttatcaaagacgatcgaatcgacataccggtagataacaaatcccaccgcgataccagccaaaaggccgcaaaagacggccaaggggaaggaggtggcagggagccctaatccaacaccaccaacatagacaacggcttcgagaccctcacggagaaccgtgataaatggcaggatgaacatgacgtatttctccaaccatctcttgacgcgacccttctttgtctcgttaggatcgtgctcgtgttggagggccttggcgagcttgacacgccatttgtcttgaagtttagacacgcgcagaagggcagcgcccatcacagtgatgatgatcgatgcgatgattcccagaacaccctcccaaatatcctcggtgctggagaatgtgtccgttccgaggccgtaaaaagcaccaatcatacctgctccgactgcgagacaaataaatagacctaaggcgcatcccagccagacctatttgttttagcagatgaaattgcataggagtgtaagagccggtcgcttacttgtttcactagtcttttatacgtcgggcgatcactctcgtagagcgattgtttcaagaatgccagtagaactgacacgaccaccgtcgtctcgagacattctcggaagcagataaaaaacactgattgaatatttagtaagtagttgtgtattccaaaaagcagatgaactataccggtgacagcgaagaccttgttattgcccatgatgcttgatatgactttgccagttccccaaagttcaagggagaagagactcaaataatataaagccaccggaaagcaaagcacccgataaggtctcttgtagccgtctgaaaaatatatatcgaaattcaaaattcaaaattacgcgggagacaacaagcgtttcgatgtctaacgacccacctgtattgatccgattgagcttagcattcttggagggttccccgtatcagaagcttttttgggcatctggcattatgattcgtggcagtggatatgtcttgaacacgaacgctcacctggccagggtccagccaccttagttgagttgaatcggaaaaataaccggcctgaagggatagaggtcatgccatattccttaatttggcaggtgagcagaagttcataaaaatgtgattcgttcaccattgaatattaagcgaacaccttgccttatggctgtgtccaccgttggtatacctggaaccaaaccaataagaagggggaaacctcccatggatttatatctgattaggatcagaaggatcggaaaggattgagtttccccttatcaatcttgtattgcgctcggactattccaaacttccgttcccaagcgttcccaggctttcctaagctcatagtccttctattcctctcttcacccggaaactggaaattcttttcctgcttcttccccggcgaagtattcaagcatgactgtatatacaatgctgttccgccttgcggcagtactacttcttgtacagtactgtcaagcgaagacagtgaatctggatttcaatgtcacctgggtcaatgcaaaccctgacggtctctatgagcgcaaggtggtgggcattaatggccagtggccgctacctgtgattgaagtggacaagggagatcgcctgattgtcaatatgtacaacgggcttgaggacaaggagacttccatccattggcacggcatgttccaaaatgacaccaataatatggatggtccagcgatggttacccaatgcccagttgctcctggcgcctcgattacctacgacttcaccatcaaccaaaatggcacttactggtatcattgtcataccgatgcttgctacccggacggctatcgacaggctttgatcgtgcacgatgatgaggcatatttcaacgatatgtatgatcatgaggttaccgttacgatgagtgattggtaccacgagcttgttgaggacattccgttcattcgtgtccaaaacccgacgggagctgagcctgttccggatgccttcctcttcaacgacactttgaacaccaacattcccgtcgaggctggaaagacctatttgatgcgattgatcaatattggtgcctttgtggcgcagtacttctacatcgaagatcacactttccgcattgttgagattgatggagtatacgttgatgcgcaagaggccgatactctttacatcgctgttgcgcaacgttattctatcttggttactatgaaaaattccacggacaaaaactatccgatcgtgacagttgccgactcaattctgctggatacaatctcgccttctcttcagctcaatcaaaccaattggctcgagtacaatagcaatgcagcgcatccgcaagctgtaatgaaggtggatattgcctccgaccttgtcccatacgatgacgtgaagcttgttcctcacgaccggatggagctcctcccagaacccgatatgattattgaggttgccgtcattatggataatctgaataacggtgcgggctatgcgttcttcaacaatatctcctacacgaggcctaaggttccaacattatactcggtcctcacatctggagattacgccacgaacccgcaggtttatggagaattcacacatccgttcattctcccccacaatgcggtcatcgaggtggtcctcaataaccaggacggcggttcgcatcccttccacttgcacgggcacaacttccagctcgtcagtcgcactccctcatatggcccttctttcaatgactacgccgacggtgacccacttccttacaatgcaaccgataccccctctagcaccttccccaaataccctgctcgccgagataccttcgtcgcaccaccccagggcaattttgtcatccgtttcgtcgctgataaccctggtgtttggttgttccactgccacatcgactggcatatgtcgcagggcttggcgatgtcattcatcgaagccccgaagcagattcaagagcgaatgtcgctgacagagagcgaaattaacctctgcaaggctgccaacctctcctacgagggcaatgctgccgctaacacggaagatctgctcgacctgaccggtcaaaacaagcagcttccgtggctgcctgctggatttacggcgaggggaattgtcgcaatggttttctcctgtgtgtccgctttcctgggcatggcgttcatttccttctacggtatctcaggcattcaaaaggagactgctgtggttaccgaacatgaggaatcgtgaggtattttattggatttctgctgtactttaatatatatatttgtctttcttaagtggataaaaattttcattcaccttgaattgttcggttatcaaatattccttgcatgtggaatatagcaatacacgtctgaatggtactttccaagtgaaatttaaaggacaacttgggcttccccgcaatatcaaccctcggtcatcggctttactttccattcctgggaagcgacgctgagaagtacggcatcgcattctcaggtatgttgacatttggcagaaatgacaaaagcctatgtaattgggcttcagcagtgaaaccttaacagtataccgatgcccaagtcccttcccagttttgggctggtaatatgcctcctcgtgatcttaccctcagtggtgatcacactagcatactgcccccgctgcggagcatcagtaaggcctatgcgcctgtgtatccattttggtatgaaatcaatgaacgatagtggaccgacaaattaggttctcctagcgatgtcgctgtcgtcatccacgctggtatctgcaccatttctgatccatctgaatatgaaaatgatggttactgcgggtttggaattatcgaggctcgcgagattgatgcgatcaatatgctcgatactactggttagctcaatgtggtgattatgtgctctccaactcatccgcttcgaccaggaacggatggcatcaccaaagacatccgtgatcgcgtcggaactgacaatctgatctgtctttcgattgacatcgacacccgaatctgcttgtaagtgtcttttctggagaaggcaccattatttattgaggagttccatgaacttcaacggggcggaggtaaggcaaatttgctcgtatttacgcccatagccgtgtcaaagaattgaagaatggaggagggtttgaaacccccatgtcaggttgtaaacaatgatattcggtgcttatggacaggcgttagggttcgggttcgggttctagcatatgcagcgcaaggattttatttagcctagaaatcgaaaaaaagctagttatcgcggatccttcaacggtttgatgatagtggaccttttttccaagccaatccaggaacgaaagtcaaaaaagacacatgtttcagcgcagtttccacgctaatgggtataagaggaagactagatatcttgggctcgagatggatagccaattacagtactccagctggaaagttcaagcctttagacataccacggagtactctccaggagtactaattatgttgtaaagaccgtttgacatagcagtggacatcaagcgattccccaactctgagcctggctccgcatcgcggtgaattagggtggaccccgggtctaagagaactaccggattggtttggctggcccgtcttggacaccattgggctccatctggaagtgaacacgcagcgatcggcatccagaagggccattgggtgagtgggagggtcgaaaggaaaaatgagctcggatagttcctttcagcccctcaagtgcaccctgatagagctaaaaagcaaacctgaaacgaacaggcacaacgtggagacttgaaacatccggcagttttaatttatggagataagcgtcggccataatagttcacattggaagatatgtcaggcaaggcgtgacatgacactattgaaccatgtgctcggagtattactcaatgggacattgctacatagttatttagatagtagttaggaccccctacttagtagaagatactaattaatacaaagaaaagactccgaaccttcgtagagagtacatggagttccaacgatccagacctcgggaggttgattgcccctgaatccccaaaaataaaactaaaaagagctttagagcataaaatcacccttcatcttaattaaacgctagactgttcccagcagtgcacggtgtccaatttctccagcatctctctggacctttcatatttccgcctccctactttctgcagaactcacagaggggactgacaggtacgcgtctggttgttgatgtgttcttatcgatacggaaaaaaagatacttagggggggctaacacttgacttttctccacattctagtcatctcctattttacgcttcatgactccacgcgctatcgattagcacttcgaatacattctattttcgtttcacctggtgcggttctcttggggagagagagatggccgtctcaccgccagcatcacccactgcacccccgcgccctatcagcgctgtcatgcgcactccgcgtagtaccagtcgtttaagtatgagcagcaggcaaggtggaagtcgtgcatcggatgaggatggcaagactgcagtcaaagtcggtatgtgcattcttccccctgatcggcccattccatgcaatcaaggatacacaacatcggctggcaaccaaattcaggactgaccttgcgcagctgtccgtgtacgaccaccactgaaaaacaccgatcctggttatgaattgattccccagagattccagaaacccatagtccatgtcaccgcgcccactagtctggccgtcgatgtgggcgctgcgcgcaaactatttgtgtttgatcgcgtgttccctgaaaccacggaacaggaggggatctgggaatatgttagtgatagtgtcgactcctttgttctgggttacaatgtctccattatggcgtatggccagtccggcgcgggaaagtccttcacaatgggtacctccggtcccacggagcagaataacatgcagaatatgggtgagtttgaaatgcgttggtttcccaatcaactcagggactgatcgtgtgtgtgcattgtgatttaggtatcatcccccgtgctgcacaggtcttgttcgataaactagaagggccctcgaaacataaccggaatagctcgcatccgactactggcctccgaacacctcaacgatattcaatgacttctgccgggagctacgggaagttgaatcacgagaaagaaaagagttggcagctgaaggccacatatgtagaggtgcgcgtttattttagggcttgtttgctggcagcgcattgttctgaccattgtcctacagatctataacgagcacctgagagatctactccttcctgaaacgacaaccacaaccgatcgcagcaacgtaacgattcgtgaagatacgaagggccgtattattctgactgggctgcaccaagtcaatattaactcattcgacgatctgatcggtgccctgaactttggctcggcgatccgtcaaacagattctacagcaatcaacgccaaatcgtctcggtcacatgccgttttcagcttgaaccttgtgcagcgcaagtcctcaccaacccatgcgacgccgagtcccataaaggagaagcgtatgtcgatgccggtcgacacgttcaacgccggagaaacagtcactgttgatagcaaactgcactttgtggatttggcaggtagcgagcgactgaaaaataccggcgcctccggagaacgcgctaaggagggtatctcaattaacgctggtttggctgcgctcggcaaggtcatctcgcagctctcctcacgccaacagggctctcacgtctcgtatcgcgactcgaagcttacccgactgctccaagattcgctcggtgggaacgccttcacgtatatgattgcttgcgtgactcccgccgagttccacctaagcgagaccttgaacacaatctcatatgctcagcgggctagagccattcaaagcaaaccccacattcagcagattgcagacgagggcgacaagcaggctttgattgaacgactcaagtccgagatatctttcttgcgcctacagatccgcaactctgaaggatccgagcgccgtgaaggaggacccactgaacgaagtgaacgtaagaacgaacgtgaaaagcacttgcagaatcagttgttagacgtccaagaaagctacaattccctcagccagcgccacgccaagttgatttcgaatatggccaacgattcgcactcgcctgctgcccacggcgaaatggacgacgctacctccgaaattgggaagaactcggttgagagaatgcagcgatcaaggtcctttgccgagtctgtggagcagatggttctagagtacgaaaagaccattcaaagcttagaatcttcactctctgaaacacgcgcctccctctctatcacggagagtgatttgctcgaacgcgagaccaagtgcgcctatatcgagacggtaaaagaacagctccagacccgggtccagaagttgacggaccgagaactcaacactgagaactacctccacgaattggagtccaagcttgatggccactctacaggcgaggagaaacacgctgccattgttgcggaattgcgcaaggagttaagccgggcccgcgataacgaggccagctgcgaggaatacatctcgacacttgaagagcgacttgcggagggtgatcaggacatggaacttatgcaacgcgaggtgatgcgcttggaacatgtcattgagcgccagcgaggcctcgggcagctagaccgcctactcggcgagctggacccagaaaatggtggggatagatacgacgttgccaatggcactgactaccaacactatcaccagccaagccgtttgcaggcctctcataggcacacgccctctctggacgttctcagcgaagcagcggagacagccatcccggagtcagacgaggatcttgtcgagccgaccatagaggccgagctcgaatctatcggagaatccgagcaggggacgggtgaggacttgaaggttctggaaactgcgactagcaagctggaggcacgtcgcacggaggctcttcgtgaagacccgatcgcaagtcccgctcagtccaaattcgttgccgacaagcttgagactgtcacccaggagctgctcgacctgcgtctgcagcatgagaacaccgttggtgacttcgagaacctagaacacaaataccagcaggctctcaaggcccttgaagagcttcgccaagacaaaattgacgaagcctgccacccggcacctagtgttcaaaaccaactttcaccgcgcccggtgacttttttagagaatggaggcactccgacctcgaagcctggagaaccacactcattctcgcaatcactctcatcggaattatcctcggtcggggagcaatccactttgcgcgcattctctgaggacgaatcgaaggcaattccatccatgccctcaacccctcaagtgcaggtggactccgaagagtccgagagcatgcgtaatatgcttgctgagcatcaggagagtgctgagctcatgacccagaaatatatggagttgcaaaacgagcatgagcagattctcggactggtcgaaaagctgaaggccgaggctcgcgccaagtcaaactcaccccctacaacccctggcatcaaagtgatccgccgcatgactagccagaacattctgtcaggagttgaccgtgcaaccagagccattactgggcttcggctccttgcgtccgaggagtttgctgacaagccggacgctatgctcaacttcgactaccatctggatcaaaccatgcacgaattgcaaagccgcatggagcgcctccaatctctagaagccgagaaccagggcgttaaaaaagaaatggaaatgaaagcaactattatctctggcctgaccagagaacgctcgagtctgcagggtgcttcgcctgtggacatggctttagtgtcgcaactgcgcgatcaagtcgtctcccaggaaaggcagatcaaccaccttcgagacgctcatgaagcccgccaaaaggagctgttgactgagattgatactttgaagggacttttgaagtctcaagagaacgctagccgggcactcgacgccggtgccgaggagcaggaccggaagatcggtgctctgcagggagagctcacggagtggcaaggcaagcacaagagtgctctagagtccctgcagtcctcggagtcgcagctcactactactcttgctgagctggagggtgctttggcttcggtcgctgctatgcgctctgagcgtgctgttaccgattccgactctaccgagaaagaagtcactgcgcaagagcttgagggtggccgcgccgaacagcaggagcttgtggatagcctgatgaacaacatcgaggatcacaagtctactattgctacccagcttgctacgattgccgggctggaagaatccctctccggtgcccgggaaaaactggcttcacagaccactatcgaggaagagaccaataccggtgctgttgacctgggtctttcttctcggatggccgagcttgagcagcaaatttccgcccacaaatcgtttgtcgattctcacaataatgagctagctacactccaggagtctcacaagcatgaactggccgagttggaggagcggactaaggccgctgcccaggccgagtacgatgctcgtctggctgagaaggatgctgagcatgagcaatccatggcgactttgcagaatgatattgcagagtctcgtaatgagttagtcaatctgcttaaggctgtgtcgactcttctcaactctgaagtctccgccgagaacttgacggatcagatccatgatgttttggtccagaagcagcacttctcagacaagtatgccgagcttatggacaccaatgaacaccttcgcaagcagcttgaggctaacgccgatgctgagagtcgtctggacgaaataaccaagaagaacaacgtccaggacgccaaggtcaatgagctggctctcttggtagctactttagaggatactcttcgccagaaggacgaacaggtcaagaagaaggaagccctggtcgaggagatcacaatcgagaagcagaagagtgtgcgtctcgtggaggagctggaggaacaaattacaaacagcttcgatcagcaccacaaccgtctgtccgtcattcagcaggagcgtgatcaggccctggaagatgccaaagccaagattgtgatctacgaaggcgacatcgagacgtaccaagtgcggatcgagcaacttgagcttcaaatcaagaacaccgaaggctcccatgaccgcagcagctccctcacctccaaccttcgcaagagctcttccgccgcctctcttccctcgcctccaccggcgatccctctccctcccctccccactatcgcctcgcatcccaacggcgcttcgagcgtgtcgccgcccagctctcgacacgccagcaaagagctgtcccatgtccaaatggtcgaggagcaggaggctcgaatccgaacaattgagaagcacttgtacgccgagaagcagctgaccgccaccttggaagaggccctcggcgaccttgaactccagagtaccaaggtcaagaccgactgcgaggcctggaagaagaaggcctgggaattcgaggatgaactctccaacctccgcaaggaacgcagctctgcccgtctgtccctccaggccgtcgaagaggagcgcactgcccgtcgtgaggccgaggctgcgcgcgctcaactcgaagcgcgcatgatcgccctcaacaagaaaaagaagaagagcaccctcaactgcttctaggcgtttttgactctgaccttgctcgcgtttgagctgttccagcgtcaaaagcaatcgcattctcattcgtcttaatcgttctgtctggttgtacactttttaccttctctgttactcttgtcttctttttattttttatttttcttattcgtcccttgtttcataccccttttttatttgattccaagcagttagtcaccgatttccgtattatgagctttcacgtttttgtcactttcccctgtcgattccgtcaataccttgtcctccttttctcactccattcttcacatatcttttctttttctacttgcactcatgaacctatcatgacttgtagatctttttatcgcccttctatcatccctacgctgaataacctcgatgttgtacattccgtcggctgtttctagattccgttgaatcttcatgtcgcaatcggggggaatcttgtcagctctcagttgcttttctgcacttgaatttcatatgaatgttccctcgttcatcttgaaattcttgattcgtccattcttatcaatgaagttaccaatgccagcctacttattctttctcgctgagcctgtagagtacaaatctgataggtttcgaaattcactccgtgaatctgactgagtaaagagcaagtagataattcgagcttcatactgcttcgttgaaccatttagtaagatatcactctacgttgtcttcaactgctttgcaccgatgactatattggatactcggcatgatagtacgactaacactaagcccaccacggccttaagagcaccgcaatccaagggtctatatcctaggtattggacgttacaatgagctaaaacatcatcgagactaaatatcagacaaatggatcaattgaatttgtgtaataacactctggcatattcgcatcacatgacgcgtataccccacgtgtctttaagctggttgcaacggcagctccaatctccaagctccaaaaacaactcaccatgggcctccaacggtccgatgtgacaataatccacccagatctgggtatcggaggtgccgagcggctaataatcgacgtcgccctagcccttcagagccgaggccaccgcgtaactatctacacctcccaccgcgataaggcgcactgcttcgacgaggcgcgcgatggcacgttggacgtccgcgtgcgcggaaacaccatattccccgcccatatctgcggccgactccacatcctcatggctgctctgcgccagctacatcttaccgtgtcactactaggtgagcttgggacaagggagaccccggaggcagctactacaaccaccgatgacgaggatgaccgcgacgatatcttcattgtggaccagttgccggcctgtgtgccgtttttgaaatcgttcggccgcccgcgcccgtcccgacgccagcgcatcctcttctattgtcacttcccggatcaattgctcgcgcgccgagatgagggcggctcgcttcttcgcttggcgaaggtactgtaccggtttccctttgattggtttgaaggctgggcgatgagcgcgtcggatcgggttgtcgcgaactctagattctcccgcggggtcgtgcgtgacgtctttggctcggaccggttgggtgatgtggaggtggtctatccatgtgtcgacatggatcccggggtaccggtacctgagaaagcggaggaagaccctctctggggtgggaagaagatcctgctcagcatcaatcgcttcgagcgtaagaaggatatgggtttggcgattcgcgcttataatggactgggagcggagaagagggaaggaacgcgattggtgattgcgggtaagaaactgtgcacagatttgcgatttgtatgaattctaacatcgtaatttttaggcggttacgacaatcgtgtccacgagaatgttcactaccaccaagagctgaatgagctcgcgaccagtctcgggttgaagaccgcaacctccaggacagtgctatctgcactttcaatcccggagaacattgatgtcctcttccttctttctgttccgactgcatttaaagatacgctgttggcacaagcaaagctccttctctacacccccatcaatgaacactttggcatcgtacctgtcgaagcaatgcgcgttggtcttccagtgctagcatctaatactggcggcccactggagacaattgtcgagggtgaaacgggctggctccgggatgcccacgcagatgaagaatggactgctgtgatggacaaggcactttacggactgagccaggaggatcttcagcgcatggctcttgctggcaagaacagggcgcaacaagaattctcactcactgctatgggcgataggctagaagaagaaatttccaccatgctgaaagctgaaagaaggccatttaatgggtggcagcaggtctttgtcattcttgcactggttggggctcttcttgcggtgatggctgcagttttacttcgagtgctataatgcatagtttgcgtcacgcattaaaattttgtactttatattagtctatagattaatctttctcgagttgcaccagtttcccatctcctgtactaaataaatgttttgtccacccaactttaccaaaacactctcacatccaagtcacatgacctcgtgtgttttgctcgcggtgacgtcgcgtccccctctatctttatccttaatcggccgccctagtggcattgggatttctcaacatgcccgaagtaatagaccttctatcctccgatcctcctatcccgccaaaaccccaaccgcaacagcaagccgaactcccgtcgcgacttgcatcccaccagctcaatccgatttcgtcagacccgttcgatacatccctgttcgactatgaagacatcttcgacaagccggccaagaaacggcgagtgagcgatcaagacacttcttcagtgcgaaaaagcaccacgccaaacgagcctcgaggtccggcttctacggcagagccatggttctcgatctccgatgatgattttgacctgccgccagtaaacaacgcggcgaaaaaaaccaattcccagtcgcgtgttgaagagtcggatccaattgtttttacctcttcggccccagctcccttgaagcctttgtcgcggaaatcgaatctttcaacccgggatattgttgcgcttgatgacgatgacttactgacggatcccatgaaacctccgccctcgagttaccgaggacgtagcgatattgatgaattcagtgatccgttttctctgccggagttttctgacctactgaagaaacctactgtctcgaataccatcttctccgagtcgactgctcgcctattatctcgccttggcgaagatacttcaggccctaaaacaaagtccggtactcgaaaacagaaaggcaccagcttggaatctaaggctgcagaggtcctctccgatgatgagattcatgaaccagtagtacccaaggcagcgaagaagacaagcaagattacttccgctgaaaaggaagcaaaggccaaagcacgcgaagaggcaaagctgcagcgacaacgagaacgcgagctggagaaagagcgcaagctcaagctcaaagaggaaaaagcgaaagagaaacaacgggctgccgatatcgcgagcgtcaacaagctgaaagtaaacaaaaaggattctacaccagagatgatcgtcgacatggctacatctttcgaggacagcagcgtcggcactcaaaccgtcgagttcatgaaacgactcggcgtccaacacacattcttcacaagcgcaattccccacgtagtaaaatggcgtcgcaaaatgaacgccacatacaacagaaccctacgccactgggagccctgtccattctttattcaaaaggaagaccacgtgctgtgtctattatccgcgcaagagttcatcaaaatgataacccccccaccagacgacgaagaaagagaaaccctagaaatccacgtcctccgaattaaaagcgcctacccagagtgcaaacccatctacctaatcgaaggcctgaccgctctgatgcgcaaaaacacaaacgcacgcaacagagccttccaagccgaagtcctgcgccaactcgctgaaacaacggtaccagaggaacagaccacatccaacagagcccgaaaaccaaagaaaaagccggatgcgacgcccctcgtcgacgatgagactgtcgaagatgctctgctcgaactacaagtcacgcactcctgtctcatccatcacacgaccgcgccagccgactccgcggagtggattaagaatttcaccgagcacatctcgacagtcccgtaccgtcgtgaacgacaggaagcacacaatgctgctttctgtatggacaccgggcaggtgaagaccggcgccgataagaaagatactttcatcaagatgatccaagaggttagccgcgtgacggctcctatggcttatgggattgtgggccagtatccctgtgttgcggatttgactcgcgcaatgcggatgcatggccctctgatgctggaggatattaaggtaggtttctttttctttcaatcgctatactggtttttttctagatctatactggctttgctcttttttttccgccggattctctactgactgctgtagaaatccgcgaataagaacggctccctgacgaatgcgcgcattggacccgctgccagtaagcggctgtacaaagtgttcactggactcgatccgagttcaacggacatttaggtttgtttttggcctcatttggttttttggttatcatttccatttttggcttgaactactgcagagcgtagctttgcattctggacgcatccaattggggtggcggattttcttttggttaatcactccagcacggagtagttggacttctaatactctgcctcgcctcgcctctcttttggatgggaaattggatattcccctgcaaatgagatagaattccttggctatgaggctgcggatgccagttggtgcaggatgcagtgatcacttttttcttcttgatggaaatgttgtatttggacatcctcgtaatatgatagaaagtatcgaaacaataaagactgcctagctatatgcaaatgccaaacccacatctatgcatagaacccattatcaacgccaatataaacgcatatgtcaaaacatcaaggacatacacaagatcaaatcaaatgcttccatactaaacactaaacaacaacccccctcctcttccaccccctccaagcagccacccaagccagaacagcaacccacacactaaccgtgcagccagcagcccagaacccatagcatcgccatccatggcactgaccatcagcaccatcaccgtcgccgcgatccatggcattttgatatgccgcggagtagataatgccccagagcgcggcaccagccgcaggcatcatggcaacgataccccaatttgtggcgaagttctcgacgccccagacgacagagatgatgataggcgcgagggaaaaggcgctgccgtatccgaagccgatcagcgcggttgtcaggttgaagatgcctgggtgcgctaatgggagaggggaggcgaggaggaggtagcctagggagaggaggaaggctgaggggacgaggaaggtcatgcgggatagagtgaggcgcgaggatgcaggggatgtgaggggcgcgtatcgggctccttcggaaatcgaaggaaagaggtgtgttgccgggggtgcgaagaagtcggaaagtgagcctgttagaaggcgcgcgatggtcgaggttagggctatggttgtgacgtgggttgagggggatccggctgggggtgatgcgcctgtgggataggattgaggtgtgagggttgggatgattgtgcccagctattttggtcaataggttagttatgggttggagtgagattggagacgaactcacgttgttaatgtacgattcgccggggccggtgaccaagaaaaagcctgcggccagccaccacatggtcttgtcttgtaggaatacacgggtttcatagttgagcagccagttcctcttccggcgctcctcttcctcgcgctccttctctagcctttgctgctcacgttcttcatcggagaggattgattgctcctcatcagatgaatcagagaacgtgccgtactcaatcgcttgtggtcggaagaaatcactctcctctaacagtccactgcgctctagttcttcaaccgtctcatcaatatacttatcatcatcatccacgatgcgcaaggcaaaggtaccgatgatcccaatcaccagcaaaagcaccgccagaaagacaaagtatttataaacgtcgagatcgccgtgactcccatcctcgaggggttcataaaacaggtacgtcccgagctggctctgccacataccactgagaccgaacgcggcaatcggaacagcaagcataatccccttgtgctttcccctgccaaagttcttggcgcacgtcgcaatagctgctaggtacatgcagctagtccccataccaatggcgataaacgccacgatcatcacccagaatggctgaccggaaccacccgcatcagcaggtgggccacttttatatgtgaatgcagcgaggagatacccgacgccaaacaccagtcccgagaacatggccagtggcgatgggctgtagcggtcacacaagtagccgaacaaggggacgggaaggtacattgcgatctcggcagcgatggaaacggcattgacctggagctgcgagtaatggagtcgagtaaggagaagatggccatacagagagaaagcagtgatgctgccggctcccaagctgcaaaacacgaatataagagtcagcttccaggatcccaatggagatagatcgtctcgtaagcatggctgcaaggaagaagagtttcccataccaagtaacaacaccccagccaaagctgagcactcggataacctccttctgcatcctccgtctgtcccgctcgacaatctcttcgacgacatcgctcaacagcccgtcatcactcagtccgtcattaccggagctccgtgaacctcgccgtgaatatcgccatgacggctctgcgtttcggtctgttgtatcttgttctgcatcaatattttggaggagtgggcgattcgcgtcgaaatcgcgcttatcgatcgtcatagtgccttctccgcaccggttacgctaggctgtgcaaccgactctttgtctgaggggaagtgtaagatgggtggtatagataggtatggaaggcgggaggcgtttgagatagaactatatggtgttcacgatttggcctgatatgtacgctgagtacgattgtccgtgtgatagagcttcaagggtggagcggtgtctgctgggtggatcctgaggttgcgttgttcaatgctacgtcattggagttcagctttcgatcccggggagttatgttcaatgtagaattgtaggtaggtaatatatgtgatgctcaaaaggcgtagtcgtcaaggcaagctgaggaggacttcagcggagagagcggagagagttggagtcattacacgtgactcattctacaatacccgatcacgtcattgtacggagtaaaggaatacctatactgtgatatagtggaaacgaagggaaatacaccatctagagataaaaaggatattcatgtacaagtaataccataggataacaacaggcagaccgaaaaaaaggatttgaagacattggggggtattatcaatatcaataaaacagaaagaaaagaaactgatacacgcccgagaaaaaaacaagacaaaagggcttccgagaaacaaaaagaagagaagaaaaacaaggccaaagacaaaataaaaacctcaaacgactctaaatgcatccaagcgttgacggggatcatagaaacacccattgaagggccgggtcgttatttcgtagtgccgacgatcaggcgggatcaggcactggtgcatatgaatgctggcgttccgatgtggaaggatctaccctccgaacgccacgtatcggcagtgggccgagagatgataaaaacaaaagaaagcaaaaggcgaaaaaggaaaaggaaaaggagctagaaactgacttcgcccgcgtcggtttctatcatggtctcatcccaatattgagaagagggtcgctcacgagcctcgggttgagagcccagcgcgatggcttcaccttcacctcgttccacgaattcgtccagactgacctccttcataattcgctggaaatacattcggagtgtgcggaggccacgcagatatccacgatcaatgtcgtgcgggctgtgaggtgggcatggcgtatccggaggaagcttgtcctcgccagtgatgcaattagcgaaatcgacaatcttcagttgaacgttcagtttgctctggccgtctgcatggtttccattattagaacgcggcggttcttgctgaggtggagattgtggttctccgtcataaagaatcaacagactgctagcatagagccggtagctactcaactgtcgaatcatgtgctctaacaaagctaatttctccagaatgacagggatctttttggcaacactggcatagctgacaccatcgtataggaatcgagtcagcgcatcctgaaattcacgaccagacttcaaatctcgcccgaaatacttgtcttcaaacatgtactcctgcttcttgacgttccaggactgcatgccacagagccgcacacccagctgctgcgaagtagtggactgacatttccgtcgctgagacttcttcttcttctcattcgcctcgataccatattgacgggtgcccatcttcaaatccagcacgcatggtttattcataccagctgtcagatcctcaaggaggaggaagaactgcactctttcgtcctttctcagctgcgcctctttggggttgctgggcaagatcgtgttgataggctcctgtggtttgaagcgcgttggatcagaagttctaccgaaagcagcttcggttgcgtggccaccattggtcgagttattttccgacactgggaccgtggaggaaccattcgacattgaggcatcggcttccatggagaaaatcccatcctccttgtcaccgccataatcatcgtcatcgaagaacatgagttccccattgttgttagagtccatggtaccacgtctccgaaggccactcccggaatgacgccgtcttgggtggtgaacccgagagagcgagcttgctcggtcaggctcttcggtccggatcttctctagacggttttgattggcttctagggcagtcgaagccgacgatgaaagagcagagccttcactaggagtcacctttatgtcaatcgcttctgtctttagcgccgcgactgggctagggactggtcgttgattggtagctgtgcagtcttctgatagattctctcgacggtgcgtggcgcccggcatatcggaattagctcttggcaaatggacatgaccacgagcatgtcgacgatgatgatgaatggcaggagggctgaatacctcgcggagaacctgctcctgaagcttgagattgacggtcgtggcgccccagatcttggcccgcttactcataggcgatgtatcagactccgctgacatacctttcagaccgtcaacggatcgtgcgcggctcattgaagcatctgctgtccgcggtcgctgctgacgagtaaaaagatcggcaggaattatatggcgattgttctcaagaatgaccttggggatgactcctgtgacttgggactggctaacaattcgctgtggcggttgttgctttgctgactctggaggctcagagctgggcgttgaagttccattggctgtcggatctggaattattttatcggcagaatcgacctggtcctttcgtttggatgtcttcgaaaaggtgacattcaacactccgatgtacctgatcgaaatattagtatttaatatgctgataaccgtctgatcttcgtggaattgattttacatacttgggaagaaataccaacatatctgggtgcctcagttcaatgcgttcgtagaactcgttctctcggttgttcaactgcttgcatacagcgcgtctggaaaagcggaaaacagttgtgtgcccgccaacctgatgtcgatagggcttcaattccacggcaccaagaggccccgggggcgggggtttgggacgagagagaagccgagaaggctgggtgggtgtggcactcggggtttccacctcgtcagcagatgggatactttcatctgccgattggggttcgacttcggaatcgtagattgaatcgctgcattcagagatggtactcaaaggcttttctggcacattctctcgttgagaatggatatcgccataaaggatcttactttcattcttagatcgaaaggatatatccacatggctgatttcctttttgggagaatcgctacgctcttgaggtactaacatcagctcatgacctttctccgcagccgacagctgacccggctgtacatgaagagggctgtcgggaaattgttgcaggccctcaaccccatcaggaaccgtacgctcgtgggggaagtaaacggcagaagaaatctgctcgttttcttcctcctcaacctgaccacgctcctcttcctcgaaagagttagacggggatacctcggcatgaagatcgctctggaagtagtcacgggcgcgctctgaatattgagtgggaatgcttcttgagaaagaagacccatggctaccaccaggcgtgagatgaaagtttcggatctcctctagcaagctgcgaggcaaggctgtagggccacgcttggaggggtcatcatcgtatgtggactgagataattcagccgggggaggttggaaagacggggcatcgccaagtgcggagagtgatgtgcttttatgaagcgacgtttcgtgctctgagcgatatgattcttgttcatgttccatgatgcgatccctcgactccaacgtctcatcttgtggtcggccgcgatcctcccgtcgtttgcgatccggtgaagaagcagtgttttctttgaaaaggcccaggtagtggctagacttacgactgcgcacgttagaggccggctccgggttggtaaaattggcctcgatcgagctgtcaactcggccacgacgacctctgctggggcttcgctcaagcaccacaggggtctgaggtttttcttctttcgcactgtaggataagggatcctgactgatctgagagccctcgtggccagaggttgggatagtcaaagagtgagaggtagagacatcatctaatgcagacgggaacaatttccgctcaggtaaagtgccttggaaccgactggtcttcgtacctgtgttatcccatggcaccttgtatcgctgggatccggccaaatgaggcggcgcacccgtctcgacctcggttttctttgagcgaccagtcggcgaggtcggtgtgcgcagcagagacaaacgagggaggtcggtggatgagaagagggtcgaggaacgcaacggagaggttctgtggacgtcaacttccatgcgggaagggtcgacgctataacgatggggagagaccttggagaatgcacttggagacacggatgcatcgtcaaggctagggatcaagttgacctggcgttcattgcccaaggccttttcgggggggagttgtggggtagtggcggcactatcagaggggaggtaatgagtagcgaagatactgtcacgttcggacagttgaggcctgtagacaatatcaggctgcgcggtgttctccggaggtgtggtagcggttctttttagagggaatattcgggagacgggctgagaccaggaatgggcggtgggggattccgcgcgcgacggtgataaaacctccccagagccccgagacaaatgagcttgcggcaaatggtgacgtgggccacccccgatgatattggagcaatcatgttgggccggtgtagcaggtgtcaccaggggactaggcaaggtatcttcgggaacggacggcgagtttgacatggggaggacattggtcaagcacaggacgggatggtatggaagcggaaaccggaatggttgggcgtaagtaaaaaaaaaggaagatttaagactaagagagaagcctagaacaaggaagaaagataggcgggttagaggaatgtctatctattggcaatcaaggggaaagagttatgggcacgttgaggcagacagagatcttacaggctaaaggaaaagccgcaaatcggtgagaaggccggaggatcaaaagagtcaaggggagttgcagggaaagggaaatttgaagtttgcgagagaccagccttgggatcgtcaccgcccttgagtggatccgatttgggccaaaattgggataaaaatgggatgaagatgatattggagattgagaaggagaggaagaggcagatcaaggcaaagaaagatgaagtcataagagaaatatatgggagtccatggcacgagacagtccaagtacagcttctatgagtacccggcctatcattgtgcaacgtcttacgaacttcctgactactgactgctagggttcccaggctagagatggagattattataatagattgaatcgagatctcgggatgatattagggatatttagaatatttagggatattcaagaatataataggtattgtacaaattaccaagtaaactcccaaggttctctattataagatctatcaacttctacaaaccaaatatttatggctatatcttttgattcctatctgccaatcatctgtctcaattcatagtgtgcagccatgtcgatcgctaataggtgattcaggggatttctgtaacttgacatctcgacatcttgacatctacaacatagtatcctaggacggagtactgcataccccgtaccttaataaatactagtccagtctggggttaagctcgtagactaaaacgaccaaggcttttcttctcaccagatggccccataagggaactaaaagaactaaagcccccccacttcgaaaagccacgcagtgaccttatctcccgcggtataaaaggtaccatagatatgtatggatttatactggattactccctattggtaacctcagcacacttgattatattcaaatggataatccaagacaggaaacacacaaattcaatccaacagcgcctaagatgtgattgtgatgagataaagtgattgggagccgagcgcgtcgtgacccaaccagagtgctcggcgatgtgaaacagatgcattaggggccacggaagagactaggatggtgtttctcaacgaaccagcttcttcgtagaagaaaaggagaggagatccccgcagacctccgacttttgtactccccgctgacaaggctcctatggtctacgactccttagtttactgtcggcctccttccaccatgcgccttctttcacacttgaggccctataggcactgggaccttataccttccatttcccatcgcatgtccttgagcacgttctcccttttcgttcatcccataagaaagccgttgagtcgtatgtcatacaaggttcttccttcaattatctaccttgcgatcaaggccaaatctactattttactcttgagaagatctccatcagagttatatctattcacttgataggaggttcccgagaaatatactgccttcaaaaatgagtcgcttgaacgtggatacaggaggaaatcacgagaggtattcgtttatggaaacaccactcgaaatgcacccttcatcgcaccaacagagtctatcagcacttcctccagcgggcgcgaatgcgcacccacagcatcctgcagtggacgaacagcagaaagagcgacagcgagcatggtcttatgtaccgagtgagaaagaacaatttcagcatcaggggataatcccggactatgccaaccgtccgcccctcgagcagcacccggccaattatgcgcctttggttcaaaaccaggaacagcagcagcaacatagcacttcaatatctcctcagacgtccacaatcgcgcccgagcagcaacaacaccatacccaatcctataccagccagtcttatacaaacgtagccgaacagccgagtcacacggtgtctccccagacatatgcgagtcagtcgtatacaaatacaccagagcaacagcagcatcaatggcaccaacagattggcatgaccatatctcctcagtatgcgaacatacccgaacgacagcagaacagcaccccgatgtctccccactcatatgcgagtcatccatatgcgacgcagtcataccacatcccgaatcaacatcgcgacatcgaaataccctcccagcaatatgcctcgtataccgaaacccccagctcgccacccccgaactcaccagggccactgcccctgaaagtaaaccccgaaggtccaccacgaagcgaaagcgtgcccattgttcccgacgagaatcccctgcagtcacccatatcgccctattttcctccgattactagaccgaaaacatcgcatgctccccagccggatgatctgagctcataccaccagcccggccaaacaacccatccaaaccaggagataaagggcggaggatggagcaacagactgtgcgaattttcgaatttcggaatctgctgtctaggactgctatgtccgtgcattttgtacgggagaacgcaacaccgactctcgatgaaatcgagaaaggaagacccgaccaacatgctcggctatgagacctgcaacgggtcgtgcacggcgatgggactactatgcggatgtcaatgtaagtcgaagtccaatttcaacctcagttttaagcttgagtgaatatcgcgaccgagcaaccgagaaagaaaaaagcaccattctgacaccagcacaacagggttactggccacggtccaacacactagaacgagaaaggcatatggcatccagggtagtatcgcatcggactgcgtgagggcaacctgctgtacatgctgcacattgattcaggacgagaaggagatccagaagcgcgaggagtatcgctcccgagcggctagggaacgggggacgactctgctctcgccgtatactactcccgggccaatgtcgtatggcccgccacggagataatgcgccatggttagtgaagagcggtttcgatggcgtggagtgtctctatgtatatagtttatgcattgtgatgtaatagcgtttattatttgatgtatgtttttatttactcgtagggacagaggaatccgtagcctgtcagcattgccaatctaccgacaagaattcaagattgaagctggcagttacgtatgaaatctactgctctcatcaattttgcagataattgcatgcggttggtgagatgtgattcatcatattgccacctacgttggaaacagggcatggtgagggttgagatcaggttaggcacaagcagagaaccaaacaggagaaatcgattaaatctggtagaatcaacgagaaaatgcatatcttcatctctaagcatttactagcttaacaaccaacgtgtaatcctatggccataggtatccactcaagctctatagtttgaaagccaataattgaaccctttcgcgacttttactagacatatgtccatagacgagtacgaaccactaaaccctcaataagagtactcaagggtctcgcccaccacttatcaatcccagaccgggcattcgagccatggcagcaggccaccctccaaggtatggaaggtagcaattcagttcgcaatttaaggtagagtacagagtactaccgacacctagtcgcccctgggatgtatcatatcaataaactcaagagaggtcgtgcgatcccacgatcggacaaaccaaactggcgggtcgacaccgatctcaccggggcgatgggtcgatgcgccacgatgatccactaagtggctcacccattccctctgaagagtctacggagtcccttatgtgtatccgcactgcaacctcggctgtcaagctagccatggtaatatgcaaggcgatgcattgaaggggcgcatggatcgtagatatcttcacgtcaaagctgatgtatcaattggtaacgggggatctcttcctcggaaaaggttgatactagtcgtcaaagcccttgttgttccctgagtaggttttgactagttgcactgacgttggtcggctaatatgtaagggtgggatatatatcagctactactgtgggagagcagccattccttaaggttatatccaaggtgagacctgttcatttgttcgcttctgtgtatatagttgatctaggattcctgcgtcacgctgatatcggtgcttccactcatttggagagtcactctctatacttggtgatacgtgcaatatggcggattcagtggcccagaccatccatggctatgaccatgataacttgcgccatgtggttgtcacctcgacttgctttgccttcatcttgtctactaccgcagttggattccgcatcatctctcggaagatcaacggcagcggtctttttgcggatgactggctcattatcattgcgttggtgagaagcacgccttgattgtttacgacaaggctaacttgcaaacagatcttcgaatacggtatatcgatagcaggagttgtttgtacgtcgaatatcattcacctaaaacagccaggagctaacgcacggcagtactctacaatggactcggaacccatatcgtcgagatctcccccgaacagctcgttatctacttgaaggtatggaattgcatccgattcgctatgaaacgcatgcgtgtactaatagactcacagacactgtttacaggctcgatcctctataccggctgcattgcaagcatcaaactatccatcctgatgctttaccgaagactgttccctgtcaagagcatgaagtacgccgtcagtattgtatctctgattgtgattctgtgggctgcctgcggtattctcgcgggctgcttcatttgcatcccaaccgagaagctgtggcatcccatgctaccaggtggttgcatgaatctgtcaaaattctactacggtcttcaagtccccaacatcgcaacggacgcaatcatcctcctgatgccgatgcacattgtgtggaaccttcccatctccaaagttcagaagcttggtctttccggtatttttattctgggagtcttgtaagattgtactgtctctattcgaagtgctcttctaattaatgcaggactttaatattcgacatcattcgtctggttgtcctgattcagctttccacccagggtgaagacattacctgtacgtggaattattccctaacccatatatgagggctcctcactgatataaaaatagataaccaagtcccagcaagcgtgtggacttgcatcgagcccgctgtcggaatagttgccgcctgtctgtcaaatatgcggcctttgttcaaggtcattcataccaaagtctggtctaggctttccagccgatacgccacccacacgaacaatcccagtgattcacagattaacgagaagggtgtttggccgcgacagacacctagcccgagtaattctcccagtcccagtggtgatttcgaccagtcgcctactcataatcagtctgctgtgtaagatatgatcgggactacatctatatggatcggattttttttgcctttttacgaaggggggaggtaccgtctcattcattcctttttgtcttttgtctttttacctacaacgagaaagccaggatcgatttgttagcaattttctagatctttaagaggaatcgaacataagaattcaaacagagctattgtcttttgtccctattaagtaattttcagccaatcgacaaagtcattgactcagtgcaactagcagtaccggagacatgaaagagtggaataaccacccgaggagaaatgacaacgaaacaaaggcttttatagcctttggtacctttatttctccacagaaaggagttcaatgcttagctagctgaacatcagccgaaaatttcataaatagctcccattgcagcaatttccctaacattcaaccctctaagaataagttccgcactctaattttctttcagtccagctgatttatcattgataagaagacctaggtaagttccaattcccgaccctgcttagctccgagtttctaaaagatgtataactatgagccagcacgctcgcagtggcaaaaaagcttccaaatggagtgccgcatttttgtgaaacaggcagaggctctagctaattacaccagaaaacatccggaaaattatgattatgagcaaaactgcaatgtccatagagggcttatcagactgtggtctcaaatagcgcgagtgaaagacactaggcttgatatggttgcggaaaccccgagatgtcctctcgttctgaagcaacgcagctattggttcatacgggatcttgcagaccagaccgagtttgaagacgattgcaataagatagaggcccgtctggaggcaatggcggtaaaggtccaaacccgcgagttagagaacctttggattgctggagtccttaagtcgacggctttgcatattcaggacaaattccatatatagattatatatcttgttggaattggtgtgtaaatttgtatggattcagcataaattcgagccttcattgttacatcacatagagtttttatttcagccttaatatataagcccgatagcatctttcattgtgacatcaactcaacactatattcgtcgctagtacatctatggcctcatcctcaaattgcctcctatgcggagtgcagcttttgaggattactgacttccaacagataaattcactccgtcacattgatttggtacaagaaaaacaatagaagcaccataagaaggccaagcttaaacatgtaatggtcccatcaaaggaggtagaggaggcagaatttgagaagtatcccaacatatggacatgcatgtgtcgagccagtgagttttatatagtcgcgccctagacccagtttaccctaacagacacagttatcaaagagcccgatagcaaatactttctaagcggtatcactgcacttgaagaaggataccctaatcccgggattattccaaaaaaccccggcatggcacgaattggtgggagaagacttgaaaacccccgatacgacgacaccttcattcgattccatccagcaatactcgaaagacaaccgagagagtacaaacgcaaaaatgtcggattcgttgtccatgcccactgctgggttcttcttaaccacatcataccaacgacactgatcgagagcaaaatggagaaattcgttcgcgctgcccgacaatactggcgtagccgcgaatcgtggggagctaatgattatccgttcaggatattgaaacgtaggcagacgagacttaggattcggtcgggatattggcagtggaaggattgggatccaaaggactccaaatatgcctgtgatatttacaggagtcctctcatagtgcccgaagttcaaagagcaattgaaagcgcaaggaagaccaagaaggaacgtgtgcaatcccgttacagtgacgtgccattggaagttgcgattatgattgccgagctcatctgccctgttgactatacaccggctgatttgaagaacacacggaatatgctttctgtattgcagtggacattgcctgattggttttggaagaggcggttaaaagaggagatcttcattgagttgaactcactcaggggggccaactgttcaatcgattggcagggcctacggcttgatttgatgggtcttgtttttgataaaaactggtatgttttcagcggtttgccgaatcgtgagcgggtgcttggctttatgacgggtatcaagtcgaattttctcgaaaagtgttgagggtggaatgaattaggaggacttgctatattagtgatgtgaaatgaatcgccggttaggtataacggactgtgatggctctttatgaatgttaatactgctatctcttgctacgcttgtatttgtagaggcgctaatgatgggaaaggtactcagtacttatcacaaggtggagttatccgcagattgccacgtaccgggtactttatactaacatcgccattttgaaggtcaggcaatgccgcaatgccttacgcccaagcgaagatgcctattgcccacgccataattacagacgtgaacggttaacatcaaatatgtgcggagtatgtcctacacgtagcaggcgctaagacagcatccccgcccacatgtgtggacgtcaaagctccgatactcggtccaacgcttatccaaaccccgaagtgggaattgggctgcacggtctaatgccaaatgtactttttgtataggatgcagcccaactcccgacaaggttgggccgtgcgttaagccgaatagaggcgtctgcgggttcttaagaggcgttttctcctttgttttttttttttgcctgaatatgctcccttgagattgacgaccttcacgtacacccaacatgcgcggtctcgacgatagcactgatgtatttatacgcactggccaaaaggcccagaaacatgtgcggcttgcttgggagggcttcatcaattttgcggcacgggataacgttctcgaggttgcgttgggtttgatgtgagctctccctatcgcataaaactaacaatcaaaatgctaacatctcaaaagtatagccaatgcgttcactaaagtcgtcacatctttcgtcacagacataattctgccgattgtctctctactgccattcctgaaccgaaacatggatcagaaattcgccgttctctccaagggtccgacttacgaccagcagaatgggtataataccctatatcaagcgagagaagatggtgcactggttctggcttatgggtatgtggacccacctcagatactcatggaaggtctctcccatcgatcagttttatctcacatttatgcagactgtttgccgagacagttctcaacttcctgggtgtcagtcttactctatacgcggtcggaaatatgtacatgatgatctttcccgacaagatcatcaagcctactgtccggtgtccatactgcaggcagtatatcagtaaacaggtaagtggtctgatcgggtgtgagttttacctcggctaatcgttgattgtccaaaggcgcttcgctgtcgccattgctcaacatggcaagacggaagggaagacgagcctcggagtgataaaagctctcgcgaggaactggctggtgccgagccgagtcgtgctgggcaaatttcctaggttgtactagatgacggtggatttgtgaggtactgttaccctcatgtgcgcccacgtgagggtaacaggtacagacagtttcccgttgcaatttttgtgcagttgtttagcgagtccgattatgcacgagtagatgatgtgatttgatttattgttgttattgatcgagggccgtgaaaacctcggaaagaccgttggatttgatgaattgagatgtgaattgaatgtacaagaagctgtataatacagacaccagaatgccagatctagatttctatacctctatatcgaccaccattcgaattcagtcatatcctgtaccggcaaagtatgttgcttgcggcgccacgtcctgcgggcatgcttgatgaacgcgtcgggaggagaccaggctgcctcccaggtctgagggtgtcgcagagtggttttagattggagaataccaaagcggaaatcaaggggattgaaagtccctggaggagacggcagtcgcatgtagtagcggacgctgtcgggaatctcatcggccacatggctagtcatgatcaaggcttgatcctccgtgagaccagtgaaccggaattccgactccttcgaggagcgggcttgaacattaagtgcacggcgtttaggtctctcgccattttctaagaaatgcaagcacgcgttacgctgtgctgcagataggcccgagaaagcttcgtcgagaataacaatgtccggcttggcgacgatggcccggaggaaaagcacaatgcgttgttgtgcggtggtgagctcactgaagagaatttcatctgcgtatccaacaatgtgatccattaacgcgtatgtacctagcttgacgtgagtccgcttcgtgagtgacgggagaccggcagtcgatatttttggtacctcgcccggggcgtaatttggatccagatagggctggaagaattgcaggactgcggatatatcttgatcgcgttgaatgttcagcttcggctttgacaggaaggtctcggcgaaggcactctcaagtgctgcacggattgataattgacgcgggaagaacgcatggatctccggtgatgaatgtccaatgcgggactgcagttcgaagattgaaattcctggtttgccaggctccggaagcctggatcgtccgaaaagtttgacaggctgtgcatacgcttgcggatggtcggatgtgaccattgatagcaattttgtcttgcctgacccgttgggaccaaggatcgcccagcgttgcccccgacgtactcgccaatgcagcccatcctttgcttcgccatttacgttctgttgccaattaccgagtactaccttatccccgtacttgacatgaactccttccatatcaatgactggctctccgcccaagggtgcatggacttctgtggactttatctcattcgtatgcgccactaaatccccaaggagttctttgtccaaaacaccagccttcaagtctgctgtacatttctccaatatttccgcttgctggtcgggtaaagagtccggcttagatttatttgcgacgtagctccagacattgagcgtgtcttcgatagctggctttggcccttgcaggagaaccttatggtcattgcccaaaaccataatgtgtgtgatccagtccggcaccttgtcctgggggcgcagagctagaatgagccgcggggcgctcttcttcgctaattcatgaagaaggttagagatcttcctcactgccaccgggtccaatcccactaagtagaggttagaatatcacagccatcgaatgtgaatcagaaacacttactgaatggctcgtcaagaagcaatagctctggtttgcttagaatagcctttgcaattcgcgctcgacgagtttgaccattgcttagactcgagactggcaagaggagaagatttcctagctcaagactttcaatagtccgctggagagagagttcatcgtgtagcgtgccattttcatcgccctccatcggattcaaggaggtctgcccacgcaaatattgcagcacggtccagtcggtttcctcccggtgactctcatagcgagcactgagatatgcgccacggactcctccaatggcccccgagccctcgccgctgaaaccaacatattggaccgcattttcaatcacgcgtagccgtgggtctttttcggcgatctcgtctgtgaggaggtacggatatgaacgtgccttgggcgggatacagatgtgttggccgcggaggatatgcaggaggtcggttcgaccggctggaccgattatagcccagtgttgcggaggtgcctccttggttgcaccgttaacataaatagcgggcagagtgaagttcaggtttgggaaaagaggtggattggacgtgtcttcggaggttgggtatttcttgtaaaaggttccatcttcaatacgaaggaatgggatttcagacttgaaacgggtcgggcggtaagccgtgagccgcaatgccctcggtcgcaatttcgttcggagtagcattgtcgccatcaacttcctggaaacgtcgcaaaagtgcggagattggagattggagattcggggttaacatttacaggtcacgtgacctcaagctgattcggccgtacctgagcctcaaacagatccatgattcgctacaatacagttacatggtagagatcacgaaggctgtatatttgcaatggctaataatcgaactaggacatgatatcaggacttgtcccattatatcatgtgaccatttcaatgtccacttttctgcctcatccgaagcagtcaagtaacatcaacaaccaagtcgtagataactaatctgaatctgatattgatcatctctaagcacatggaatattctctcggagattgaaacgcctgaatacctcacgtgactgttccgatctgatcgcatccgatcccggggccggatagccgtctgtttcggatctgcatcgtgcgggnnnnnnnnnnnnnnnnnnnnnnnnnnnnnnnnnnnnnnnnnnnnnnnnnnnnnnnnnnnnnnnnnnnnnnnnnnnnnnnnnnnnnnnnnnnnnnnnnnnnnnnnnnnnnnnnnnnnnnnnnnnnnnnnnnnnnnnnnnnnnnnnnnnnnnnnnnnnnnnnnnnnnnnnnnnnnnnnnnnnnggggggggaggggggagggggttgcatagcttgacatttcgacgtgtcttatatctgctgtctttgggacaatccgaagctcaagcagtggacagaaatacttggaataaaagcaacatatatctattatcatcgccggcaagtcgtagtacttgaatcctaatataaatgtaagccgacggctaatggggcgggtgtggccacccgacggccaaactctcgggacccgattatcagaggtcgtcatggaccttcccaagcttatatagcctgctcttatttcatttccccacaaagcttccgcgcatctgtgctttccacctaaatctcacgtggcaaccacgacgcgttcatccgatatcaaatcgctgtgaatctccattcgaccaacatccaagtgcaagtatctacgcagagagaaagaagcaacatgccacccagcgcgtactccccggtccttgagaccagtcgcatcttctctgcgctgtgtgaccagtcggaacgcttcgacttaccacccgaggttcttgcgaacaaagaccgcgtttcgttctctaccagtcataatgaaatctacttcccaattccctttaaagagaccgagactctcgctgccctgaagggtatcgaaggttccgtggctgcggccattgccgacctgcgcttcggtgctggtgaggaacctcggggcattcaagtcaacctcgaagctgccactgcctttggatgccaagcgtacatggcaaaggttgatggtctgtcaaaattggacccagctgtgaaaacaaagctgaagagtatgtatttctgtagagactgatatatgggatgacaaaacaatattgactgtaacagacacggatttgctggctgcccaatccaacggctaccgacgtatgtcggcgaatctttacaagactaagaacccaggcgaatacttccatatccatggctctctggaggctacaaccaccttgaacatgattgggctcgagggccaacgaccagacctgactgattatgaagaaatcatcaaggtcatcgagagcaaagtacagcaatacacagctgcggagcttgaagatatgaacaaagagaaacgccaggccggtgtgactgcttacaaacatgaggactttatcaagactccccatgtaagtgttgcatgctgtatccgaccgcaacaagcaagctgatcattcgacagggaaaacttaatgtccaagagcctgcatggaaagtcagcaaattgcctggtgatcttcctccaactcctttcccagctagacgcaacggcagcaagaagatcctcgagggcatcaaagtactggagctctgccgtatcatcgcaggcccgactattacccgcattctagccgaatatggtgccgatgttttgaagataaccagcccaaacctttccgatgtgccgtttttccaagtcgatggtaacatgggcaagattgcagcagatcttgatttgaagagcgaggctggacgaaaggagtttgagaagctcctggatgacgtggatgtcatcgtagacggctaccgtcccggagcactagataagcttggctacggagcagaggccatggctgcgttggccaagaagcgcggcaaaggcattgtttacgtgaatgagaactgcttcggatacgagggcgagtgggctggccgcgctggatggcagcagatcgcagattgcgtaagttatcacatactgtctctactgtccagatcaaaactgacctcggctacaggtgactggaatcgcctgggcccaaggccagttcatgggcctctcaacacccgttgtacctccttaccccatctccgactacggcacaggctgcatgggcgccatcgccgcgctgactggtctctatcaccgcgcgaagaccggtggctcctaccacggcaaagcttcgctcatgcactacgaccttctcctctttgcaatgggccaataccccgctgatgtgcaggaggagcttcgtaaggtgcaaccgcctgagttcttcaagttgcgtcactgcgacagtgttgaccgcatctcgtcgaccgtgctgaagggcatgcaggagcgattcccgcacttgtacaagcctgccggttctgagtcggaaggtcgcaagccattgacagagttatggacatcgcgcgcatatggtgcggatatcgagattgtgaagccagtggtagtaattggcggggtggataatcagtttgtgcggtctagtcgtccgaacggatttgaccgagcttcatgggaggagtttagcgtcaaggagacagatgtgaagaaatgctagtcgtttccgcactgttttccttttcttttttagcctttgaatacgggatatgcacttcctgtacgtagatcgcaattgaacaccatctgcaaattacctcgagaaaccagaatctctgacaggaggctcggtctgacccaatcgaagaaattaggcttatatgcgacatagatccccgcatgattcatcattattaatttaaatagcttcacaggctggttggaaattgcggccaacggtagacatacccaaagtagttagtcgagagtgtgtcaaaaaagcaaacctcactaacaaacggtgctagaccagccggtctcgcaatgcgttgcgcctacataagcacaacaatcccacctgcctggcgtatgagctgcgccgagctgacgactctcagcggcacagctgtaatcattctgaatggcctgtggctggtcgattgtcttggtgtgtatgacgacctccgagactgtggatttgatggtgtacagatgacgctgcatttgttggctgagagtcttaagaggtgggattgcgtgggctagggagaggattggtcatatgaatccttgcatggcgaataaggataaggttatgtgggttgtgttgtatacgagtgtttctagggctttggttttagataaatagggaattagacagcggcatttggtttatggtattgatgaggggaactatgaatgtgaatatgtgctgttagtcaaggatgaggtacaatcgagctgttcattttcttgctcttgggcgtatgctatagtatcacgattcacgacatggctaacgctgatcgcgaatctttagacagcctccgggaaattgtcggaggtgaaatttgtatattcacaggagagggtatccgttataatgtgggttcgataagcttcttcagcttacgaagagagagaggtttgatcaagtactcgtcgacacctgcgatcactgccgcctgttgcatggtagctgaagcgactcctgtgacagccatgatgcgagagcgttggagaccgtgatctttttcgtgttgtcggatcttactggttgaaaccagaccatccattataggcattgataagtctagaattagcaaccacccagttagtattttcgggatgagggaggggtgtttagcagagtagtagacgaacccatcaatatcaaatcgtatcttcgacttgaactttcaacaagttccaatgcaatcagtccattagaagctgtgtcgtaactacatccaagttttcgcatgagcgtagccaatatctggttgtaagtcagacacaaggaattaatggaggcaaccgatatacagaaaagaaagggtaaattctgcgtaatcgagtttgcagtgagataacatacccggagattgatgtcattgtcatctacaattagaacatgcatatcgttcggttgatcgttcgatcttatcggagagcctccgataggactactctgacagaccagttcaactggaggctgttgtggaagaccttccggtatttctggtagggtcgacggggtaggttctgacagaagaatttcatgggtttttggtggaacggtaattggaggttcagggccgcgtatttgaggttgtaaattgtgcagatgcactattttttgagctgtttcatagattttctgaggtccgtatctgcatcaaaagttagctcagtaccgcaaaagggggtagcttctggacgtacggctgtgacatcaggatagcattcggagcaagagagtagcttagtgatgatgtcgtgctgcccaagacaatgaagaatttgaagtcatggccggtattcatggtcgagggtgattggtcattcaacctagcgttgaactttgcctcctcgataaccgcgatatcaccctctcccttctcgagtgactctgctagtgcgacatgccatcccagttgtacccccaaaacattggcgagagtactctgaatagaaagctttcgtttcgcatcggagctcagaatgccagtgggctcctccgtcaagtcaggacagccactgaacccaatgaggcatgccttcatagtgtccttgtgtctttgcacctccggagaggaagcatcgtcgaatggcttggtagggagaaggttcctcggacgccgtacggggatgtaaacatcgacctgggtaccaacaccggtttcgctcttcactttgaggtgaccacccagaaaggtcactagcttacgcacgacgctgagtccaagcccgacgccttctgatagagcgtcttcctgggcgaatggagagaacgcggagtttctgagaaagtcctgtgaaattccttggcccgtgtctgtgacacggaggtggacaatgtgaggttctgcttgagtttgagttgcggtttgtgacaatgatacctcgacgaggccggtctgtgtccatttcattgcgttaccgaggaggttcatgactattctcctccaggcaccagcgactgattggataatccaggacctggactgctcgatgtttactaccactgacaattcatcggtaccttgagtaatatgagaggcggattgcgaggacgaggtagcagtagctatttcactcgcaagagacgacacaggcgcgggtgcctttcggctggtatggagtataacagcgacttcttcaaccaaggaaccgagattgaagtcggaaactaagcttgttccagaatcctcagtgttggtcacgctgagactttgcgtggttgccaagttgttgattttacagtaatccagccttgtattcgtcagtaaaaggcctcgcccgatggactgcgagtgaaacctacaggtgatctattgtgtccagcaaggtcagtcccgatgttgagatcatgttaaccatatcacggtgcgcagtctgaagcggaatatcatgtagcaactctgcgctcgcgaggatgccatgtagtggggagcgaagctcgtgactaatagaagttacaaagtcaaatttcgagttctcactggcggtccagtgtatccgggatacttcagagatcatagaatctccaaaagccttaaagtagtgtaggtcttctatgcctaaaggacgatgacttccgtttacccatgctagtgtacctgcgagccatcgcgatttgttccaatcccatagaggatagaaaagcacactcttggctccagggagctgatgagctagacgatgggaaatctgctcaaagttctcaaaattgggatcggaagtctctggatttccacatacagaatcaatggggctggccggattgctcctgctgtctatgttgaatatgtggccatctgggaagtgtgtaatcaacgaatgcagcaactcttcagtcaatgtgaccgggcgtttggactcaaggttgctcttagttggtttgcagcttatagcctgacccaaagagccacaatatttttctggatctttgggcggatttggattaggaagatcccaagggctagtaggcgcggtgggggcatctgtcgcaaactccggcaaggcatcccaatcatcatgccgtccagaaaattcgctaaaatagagttagaaactgtcaatgacccaaagaaagagtgactaacaattgcgggtcatttcggtgggcatcaagaaagaccacggcgtccagatccaaagactctttcagtaggagactggcacgggcaaaaatcgcagctatgcgttcagtgatagacacattggctggcgctaatgattccgggggtccttccacggaagatgatagcggttcgtctcggtccgaggttcgagaaagcgatgatggctgtgtatagtttgacacggaaggcatattttgagaaaagatcgacgcttcttttccattgaggctggtagacgaaccttgatcaagcggtgaatagacactaatatccttttccgtaggcaaagaaacgatcgttccacccacatcgcttcgggtggttattgaccccagatcttcagaattcagtttcttcgcagatgcttcaatctgaccttgagtggaagagccagtagggtcaaatttcgaatgacttttgacgaagtttgtcaatcctttgaccaagttctccgaacgacgatgatattgaacgatccgcgcattttcaaggtggtttgagattgagtcggcaatctcccgaagagcagccacatcctcgtctccaaatttcgttcgaggcttgttgtccactacacaatatgaacctagtacgaacccggaagggctgtacaatggcacctcggcgtagaaccgaaagaacggccagccaaggacatacgggcgatctttgtagaaatcctccttggtgaaatcgcggatgatgttgcgtgtctggttggccgttatattctccgtgtctagtatctgggaagtatcttgtccagtgaaaagtcgaatggcgtggggacacactccccattgcaagtccagtgtattgacacccaggaatataccatcatccgcgcgatgaagatttttgtttcgaagagagatcgacgcggttgcctctgaaatgacatgctgattttctccgtcgatgattgaaacaaaagaccgattgcatccaaagcgatagacacccagttgtgtcaatgcagtcagggtggtatcatttgaaaggcgaggggatgttaagtcctgtgagatgtcatgttgatccgggtctgcgcttgtagagactggctgatcaaaagtacaataatacctatagaggttgaggaaacgttagtagagatcgcaatcgggcggggaatcacaaactttgataaatcccggattctctcttgctcgacatcatttcctggctgacccattgcagatgggccagctgatctatagctggtcacttcgacataagactgaagttaggaagttctcatggcacatatgttgtcggaataagaaaagaaaacgggtttacgaaacctgttttagggaaatccctacgctatgtctgtggtggggcttaggcctctcggtaagagatatttatgggggcttgggctagaatattccattataactgtattgattgaggctatattcattctagggacatctacatacaggtatctaggtatactaggtactcaagtgtattcaaatgtatacgcagaagctgaagtggcgtactggggtgatatattgtaccagtgacattccactagagtacccgtgatatctccaccgtggtgttcgacatatcaccattaagctatttagatgaataagaataacggtgtttttcctcgttttactcttttcatttgtctttttgcatcctctttttataggtatcgcctctccattcataatttttctagatggcaaaaatagccgacccaatctatgaaaccttggagacaaccttcgatgattaatgactccaccactaatagagataatctgatttgaaaaacatcattgaaattcgagatggtagagagtatctaattaatcaaatgcgaccggtatttgatactagttgtagcttaataggtcatattataggtgtaaatttacacaggctggttgaaattgcggccagcggtagacatacatacccgaagtagtttagcgtggagtgtgtagcttttctttttatgtggcgaatcatcttccaaggtttatggcaatgcgtcccatccaatcagcttcgagatacgctgatttgcatagttggctaggttggctagatttcctacaggaactggatatggccaggcatgtgctggtttgggccgtgctgaccttgcatagttcggacatgtggtggctttgtgtaaccgttagaggttgagtttctttttagttcttgggataattggaattgcaattaggatttggatgcgggtttgggtatcgggtatttgattccatatatatatccggcctcttgtacttcataaagtatgtccggaaatatatacccccgcagaggtggaaatacaagacagttatactgagggatttgtctctatgcgagaatatgcatgagatacaacccagactagatcaacttgaagcacgaaaatagactaaaccagacaaatctaactgcttgatgtcagcatgtccccactatgggtggagaaggtcagtatgtatttggaattgtacggctatcacgcacatcagtgttttctttcataggggtaaatcttgccatagttgcttcctataggttgcttaaggagaaactgctgagcgggtaccagcaggttcatagcgtgcgattccaaattcccccagaagcgccgacatatgtacacaaacagggtccccctgaataaagctttcaattcaacatcccttcgaaagtatcaaaaaagaaacaaaaaaggatctcgctaataaacgccacgagccggagaggatatatcgcaagatgctcaaaagatacaagctcctagatgagaagcaaaaacacacacaccacaaacaaaaaggggccaaagagaagaaaacaagaaacggaaattaggtatgtacagtccgaagacagacaagcataataccaatcaggaatcaaaaatcgggccaaatgccggggttcctcgacattcaagctcatagacaattcgcgccgtcagcacagggttactgatcacgcacaccgcttcagcctggaagtccttgatctgctgcaggatgatgggaaccatgtccatacggccacacttattggtgtctaggatgataggggctgaatccattttgtggactagatgcatgatcctatcgccgtaggtcttctgaggagcacgagtttgccaaagcacacgcagtgcgggtcggttgtcatcaccgaggaatgacagacagggtccgatgcccgatccggtagtgacaactatcactctccggaaaacacgcatggcatatgcaaagccatagatcaacactccgcgcttccagaggtgagtaggcgggttctgaattgtttctgcagtccaatcaccagctttggacaccaacgaagagaagcttgggttgccgtggacgcctgcgggtgtggggtctgggaaagtggcaaacccatgccaatcccgaagcgggtgcttggctagttggatgccctttccaaaggtggtaatagcatggtcgaaatgcaagcgggtggcgtgagtcgagagtggctcggcccgcactgcgaccttccgaaggaacagccaaggctggataatggctgctacagtgagcatcaagaaccagaatgctggcagctcgatgatgaatgttccaagtggttggcccgtggactggctagcgtttcgagagaagacgatcagcagggcgacaaacaaggccacgaccagccaccccgaaaaacggtgagtgagttcgaaataatcatgccgtttcattcggaatgcggggtgggacaccacgatgatcgccagcaacaggaccaatatgacataagctaacgcaaccggtgctgctgaaataccaatgtccgaactatcagctgatggcttccagtactggtgggacatcacgcccacgaatcccacgtaccacacgagggcagcgactccacagccgctatggacaccgccatagtggtagacttttgcggcgatccgacggaggagaagcggcgctgagcgcggcatcgaacatacgatgacgaatatagcattgaccaccagtggctggcgggccaggccacaggcaagcaaattggcggctgtggcattgaccaaggccaggagtttctgttcagtgctcatgatatacacaaacattgcaacgtttgcgcagaacactagcgtgaacagacgccggtatagtgtgaggatggcatatcgggtagatgcaaataacttgggtttgcgctgggtctgtgcctccacatcgatctcctttgcgatatcgaagtgtacggattcggctcccttggaagagcacttttcatcgattttgtattcattgatgagagtcgcctcgctcacagtcggtgtgtgtcgtgcaacgaccacctttggaggcatagtgatgggggttttctctgacataactatgatgggttcccgaggtatcacactggctcatataaaaagttcaaaagatgactggaagttgtgatgaactaatcaagccagggattccttgaagtgaaagagactgaaagaaatagttgacaacccaaccagggcgagtcctccattttgaagtgaatcacttcaaccaagacctttgttttttctcctctctctaccaatatccaccaagatcagcctcacaccccttctgcatggcgactttcacgtccttctttcccaatcgagtttgtctttccattttgggcgtcaccaggcatcaccgcgaacggtaacaccctttcgcatctgttcgggtctattcggccatcaatcgttctctcttttgagtttggctctgaaaatgaggcattcattgcatatgatcccattatttggccattttttccccattcggttgttgttcccctctcggtgtatgacactatcacctcggggtccaggattcacactattgcaagtctttgttgccaatcagcatcaaagaaccatcctactcccttgctttcagcttcacacacacctcgggaaagtgtctgacgcaatacctgaaagactccacgcagcctgtcagaaccttgtccgatcctccatcaagagggggtggatctccctttcggggatgaaccggaaagggagatcaaataatgcgctcattgaggtgcgatgcaacctaattcccagtcgatatctccacaataaccaaaccgaggaccagtcaaggcgagatgcgcccaaacaccgtcacggaccaagtgcaaccggaccagggtcgacttcactagtcctgatgggatgcaagcgctggacatgatggccagtgcacctgatcatacggtcaagaaagccttcaataaaagagacgatctgcagcatagggatagcgttgactagccacaattcctttgtaccgcggcatcaacaaggcgaatgtggatctatagaggtgtggctgaatcgtgccatgagttaatgcaataacccgtcggatgataaggcagttcatgtttttttgtttttttgttttttttgctttttattttttttggcgatttttgttttcaacgctacgtctgcgcggtcgatcatgatgcagctgagggtgttcggctaggtgccatgaccacccctccgttatctgactcgcacggcggagttgtatgctgatccttacccaacgccgaggtactggcagcgatgcacgggtgcagtacataacctagatgggtgtggagcacggtttcgttagccgatatttcgctagtcgatctggatctggaatccgggaaagaaaccgtcctcagattcaaagtccatgaccccacagccaaggcaacaatataccgacggtctccactgaatatcagctgcaggtcttgggcatccattgcaatattgggcccataacaacgggtgggagtggaaggagagtgcatcccttcacgggacgtcagcgatgaatgacaggagcggggaacggaccacgcctctgatgtggcagcaggggttagattagcctgaagaatattcaaggggaatcgaaccggcggaacagcgggatgtagcacacccctgcctaagctcgtgggcgacctgaagaaacagtttagatggccctaagaagggaatgtgagttcatcggattagagtttggagcatatctcacgatccggtcgatctctatgaacacatttccaaactatatctcacgcaaggcaagggaaaccgtcagtcaacatggggacacggacgaaagggtgatctgatggtgtggctcagctcccaagggctagcgaattagtgacaagcaaatttaattattttcgatctatttattggattttgaacccgccacaccggatggcgctaagcacgcctggtggagacacgatatagtacaccgtaccctatgtactccatagtgttgtgatccgattttgcgatgacatagtgtgattggctttacacttttgattccttgctctggaggttcagctttttcagctccttgtttttgaggtctgatttacgtctatctcgtatagtaaagagttcaccttacagttgacgcagtggagactaaacctcattacataagccatgtattccaaatcctggaacaaggtggaacaggccggggggcagaggagatgtcaaggtaaattcaaatcaaagagaaagcaaaatggaaaatatacatttacctatataacccccagggatttccatctggattcattatatactacacctcttatattacttctaatcctaccaaaatgggttacacatctatggctttgaacaatatgccctcccaggtctactcggacttgctgagtttcactttcgatggtccaaagccatacaaccagaaccaaccgctgtttattgatgccgaggatccgtcccggtcatttacagcggcccaattccgacaactagtccggaccttgatcgctgggttgaaagcccacaatgtccagccaggggactgtgtattagtacacctgggaaacagcgtaagtgaaagaagcacaaagaaaagaacatccttgaagtcggaagttcaatattggactgaagattctcggaaaataaaagaagcaatgctgactcgggcctgtcatatgcagatactgtatcccgcactcttcttcggtatcattggcgccggtggtgtctatatgggatcaaacccccggagccacccccaagaactcgatcatatcctcagtctcgctgagcccaaactgatcctcacaacccgcgatgccctcccctccatcctcgacgtctccgcggcccgtggcatccatccagcgcaggtctgcctcgtcgatgaccgagccatcgaccactgcgcacaactattcctgtggtccgaactaggatattcaccagcaggacagttctgcgccatgagtggcgacgcgcgtcacaacagcttcgcgaatttactctgcttcggcgaaagcgactggttgaaattcgccgaccctatcgtcgcacaagccacgcctgcagccatgtacccgaccagcgggacaggcggactgcccaaagcagccatcttgtcccactatgcgcttgtctcacagcaccgctccatttactatgaagtgccacacccagttagccggctgatctcgctgcccatgttccatttgtttggcgcactctggacacatatcttccctgtccgctacggacaccccctatttgtcctgccacgcttcgagatcaatgaattcctggctgctgtccacaagtaccagatctctgagacttaccttgtcccggctatcattcactctatcaaccagtcgcccgtacccatcggcgaccaactgtcgtcgctgcgctatgttgtgttgctggcgctcctattgacggccattccatgctacagttccgccgccatatcaaccctatgggatatgcttgccagatctggggaatgaccgaggtcggtgtgatattccagacccgctggggccagcagggtgaccctggaagtatcggcactcgtattgccggatatgaagcccgcttgttggaccaggatggcaaaatcgtgcaaggcgattgctgctcgggtgaattgtacgtgcgcggaccaggcctgctcactggatacaaaggtcgcacagacgcactggagccacatggatggttccgaacgggagatgtagcgtacgtcaagcagggccaatattacattgttggccggacgaaggagcttatcaaagtacgagggtaagtccatcgtcgattcccagttccctcatcaacttcacatactaatcattttacagatggcaagtagcccctgctgaagtcgaaagcatcctcctgcaacacccaggaattcttgatgccgctgtgataggcgtgaacaaggatggtgtgggcgaggtaccccgcgcctttatcgtgcggtctcgtgacccatctgtgcgccgcataaccgccgaacaagtttacaactttgcacgccggcaactggctaaatacaaagccctcgatggaggtgttgtattcgtggaagagatcccccgcactgcaagtggaaagatccagcgcttcaggctgtcccagatgaacacctaccgtgagatggtggcgtccctgctatcccgattcgatggtgaccgctccgctgcagtcactgcggctcgacgtggactacccgctccagagatgtcacctgttagtctcattcctgaggggcgggttgcggtttgaattaataaagcggggcatagcattttgcactatctatggcgcatataagttgttcccactcattcagcggtgaagcaatgcggtgaatgagacagggagggtgtttgggttagaacctggcgttgtatatttggtttgtgtatttagtttgtgtttgttttcgggtgcttattacatgttgatttttacgatccagactcaacctccttatgatgtttttaaatgactttaattattcatcttagcattacccagatatcggattctctaaatcgtactacctaactatttgtatttgaaccttacaaatcacacaaaacccgagttctcagacataaatttatgtctagtggtgaaaaaaacctagatgatccccaaagtccgagccacagcatgtatgttgtagtgagtcactactccgtacctcccacaccgcacttccaagccccacttccctgtcccaggccaaggccaagctctcggttcctgatatcggcttgcatccgaaaaccgtacacagaaaaaatgtgatgtataaacaacaactacctaatatattttatggcccgagacagtcgcgttcgcattatgcacatgcaaggtccaacaaagtacgtggggctggatcgaacggaatccgaatccgagatcgatctcgaaaatcccacgatgaagtgcatccgcaccaatactatgcagggcccaggcgtccacgggtggaaccttggaaccccggttccaaggttccctgtaaggaggttccttggtactaaagcggggatcgacggagctaaataggttaattattgatgctcgattaggttgcataaactagttatataccctgctctgcctgaaagcatagatatgacttatttgatctcacgtttataataaagacccagaaagccgcataatatggttactgtaactggtaattctctatatagtcatactgccactcctgcgggagtctctagtcctgcgggaactaacggcgtgctagaggggcatcatcaaatcaacaaatcaatacaattacttttcaaggagcgattaacagcgagctagggaatcacgcacaaagtaccgcttgaaaacaaaacgagggagtaacaatagatcagaggagccaatgtgtgatttgttcccgactactccttactccaccttggagaagctctagaccacttggtccactcagactagctggtccccccagactcctcggtctccctagaccactcggtgtccaaagatgatttccataagcagtagttccccagacagaaaagggctccgtatggaagagggctccataaggaagaagactacatatggaagaccctccgtgtggaagaaccctccatacgcaagagatctccaggtgacatactagtcaagttgcgacacccggatagggccgcgacaggacactaaaaggtgtcagcaaacgacggcttggattggtcgcttgcgagaatggagtggcaacataatcgggggaaacattggattcgatacaatacaactgaacagggataatcgagggtgtaaccaaagtgggaatagggcgtttcaagatagcgttcgcgacaaaattaatgggattcgacctctaggaaccctagtgtccggacaaggttgagcaacatatcatggcgcactggtggccaccacgcagtcttttagcatttccaagaacttttgatttatcagttcaagaagctatctcgaactttaaagacgtgaggagttcggaggtaatcatagataataatacataagtaaaagcaagcgtggtaccagaatgatatggcatgactacccactagtcgtgtgtccatgcatcatcgtagggttcccaaacagcgacagcagctcgacataaggcacatgttctgactggagacattccatagcagtttcgaagtccaacatggtcacggctcctgtctccctttgatataaaacgttgtgttttccagcatcgggcacgtagattgacagagaccgaagaatgcggatggccttttcacattcctcacggacgtgggttcgctcgcggttgctaagttcgtcccagacatgggcgaggatctgtccatccttgtaggggaggacaagcgcccttccgttagggaataaactcgagcacattatgttcccagcaagtatcatgttcgcgaagacatcgtaaccactaggtcgtgagtctgacagacgctcatagacagcacattccgcattagacctagacgaatacacatggtgagataaggaccaggataatagcaatcggaaatatacttacgcccgatcttgtctgggactccagcacttcacgatatggcgtgttccttggtgttcaatctcgaagagagccttgtctgtgtggctagggggtgaaattctccgggacacgtttaagatcgaaatcgctcttccctggtggccgagaatgattgtattcggggtaacgttcccgttcagtccggtcactagactgccctcaatggcatggtctctgagcccagaagggcggagagaagcctgaagatcatcttgaccccgaagctgacattcatgttagcggaaatataccaacaccctttgaatataacttactcgctctgccctgaagtctgaaccctcgatgtagtcatggccctgttcagcaaggatacagaaccccgcaaaacactgccgaacagacaaattcgtatcccggtctcgaatcggtggggagacacagaaggcgaagtcagctgtccgcttgacgaatactgtcccccggtatgtcgatagaaagccgtagcgcaacccgaatttcctcatctgcgccacgagttgacctataaatatgtgagtgatagtagtatggcgctaggatgagttgcacataccaagatggggtaaaatttgcggaagaatcacggggtcagacggagaaaatcgatcgagcgcgacagtccagtaggtcttgagttcgccgactatcttgacctgcgcttgggagtcgttgctgagagtcacacctatggatacatctgggataacgtccgatgttggagtttcaaggcttgaatatctcccatcaccattgccggctgtgaggcgcgcacaagaatcttggcaactggctcgcagacattgttgacgaaccgaccagataagccgatttcatttccgaccaggtatacctcgccgctaggagagtcgatgtgggcaatctggaagttaaggtccagcgatgcgagggctgatcgtatctcctggtcgaatgtagtccactggtggatgaacctttgatgtagccactcggtggagactgacgggtggctcgtgccacgggcttgtcgtaagaggggcaaaggacttgcaagaacttgaccggccgtctgcattttgatcgatgatatatggccaggttttaatgaagattcgagcgggatgaggaaaagaaagagaagagtcgaggggaggaaggagcaagatcatacaattaagcttcccggcactaaaccttgtctggtcgaaatttcgatttataaacttggattgttttcgtatagatattgttgtggtggccacgtgccgatcacatgccgttgcctggtttgccaggcttcacatagctatttagctagatctcgatcgtttgtaggaatctaaccttctacatatctctctcaccgctccaagagctatggttcatgctggatgtcttcatggatgctttgtcattatacaattaagatagatcgaagaaacctatcttaagatttccatttccgattctcatcagtaatcagacccctcctcaacaaccattatttataatatatccatactcttaatccccagcctcaaataataccataccccatccaccacacaccccaaaccaaaggtgccagcgccccaagaacagctgccccaaccgacaactccagaatgcaccaaatccaaatagtcccaacagcaggcgccttcttcataaccgcataatacggctctccattcgtgatagcgataagatgcgcgcccagcagcagagcaagaggaagaaagaccaaagtccgcggagcaggtgggaaaaccagctttcgtaagaatgaaaatgtgaatttatcacttgtcaatgggaataaagaaataggagcaggctctgcctttgcatcctttgagctgcgctttgtgaaggagacgatatgaccgtgtgcgaggtggacgaataaagtgaggagagggaaggcggttgtcacggattctttcaagagacttggcaggtcgattctttcggcgtattggtgggctgcgaggtagcctagggtgaggtggagggttgtgagaggcatggaaagaaggattgtgtcgaggaatggcggaagaggtttgtcgggttccgattcggagtcggatttcttgacagtattatcatttgtaccctgttgactattcttggtcttcttttgggaggcattggatgagagatggctgctgatgtcgccgtcggtgtcgaccaattgcccagacgcgtcgactgtcacgaatcgggttccccctgactgcgacggtatgccttgtccttccaccgaagctggaattgatcctcccctttgatgaagtgcgccttgtcgctctgcgatgatgtcatataatgtgcgctcgactgttggtttgtttttggtcggatcattgcgatggggatgggccatcgctatttcgggttcgtcgtttttagaagatccagccgctgcacgacgctgctttcgattccttggtgtttccatcttgctcaggctggtatggagggacaatgagtggtggggggaaaagagttaacaaacactgacgtggagaaattgaggttgaggactcggcgataagccccatcaatcggggttaaggtgagctaagatgatcgccagttggctcataggtctaggttatatttctcaggcttgggatagatatgaaaacaaacttttctaaattcatcattgttgctaattaattctctgcaccctttgacacactcgttcaatacatggactggccactcattcaaccagcctggtatagagctggaccggcaaccacatgcgggttaatcaagctcagattgaatggactcacgtacggattgctgtctgtaatggcaataaagatggtaccattgaaagctgggtcaccttggtaggtttccaggctcggctgggtagtatatcctcgaatgccatcagtggtactgctggtcctattggagctgctggcactattggtgctgttggtgctgttggtaccattgacaatttccagaggggtataagtaatgttcagctgcgacacccaaagaacatactttgcgctaccagctgtcgtctgggttgtggtgacgtagctgttgttgggaccgatttgcttcccaggaagatcccactccaataacaccgtccgacccggggccgagagaggcactgggcgaaccttactaacagcagcgccgcagccattagctgagccagacgagttgaatcttccgaagccttttgctgacttgggaatgctgacgcctggtccgacagtattgttgattccagtggtctgattgaacataaaccctgcagtctgattgaacccggaagtcgtgttgagccttgagatctgatcgccactcgaagtaaaattgtacccagtagcgttatgcccagtcgttcggttattacccgagggcaagttgcgataagcccctggactccacggatcgggctgattaaccaccatcagcgttgggaaattttgccaaatcacccgggtctgattttcaggacaagagctgatgaaaggtgccagcagtgtccaagcccaagactgcggtatgccaacttcaaaccattcaaccatcgggaagagaccctcgaactggcggaagatcaattgctgccgtgcttccgtagtgatggactgagtcaagagagtggccgcctcgcgcgagtcaagatgagccaagaacccatatacgccagcttccccccagcgagtgagtttctgacagaagtcgataaactccttgacgttggtgtacgggtagatatagttgcactgcttcggggcatgagctccgaggatattgctgagcatagtggcatggcctatctcttgctgcgccatgaatgcgatcacctcgcggtccgcagcggtcaaaccggcggctcggaaggctgcctcgtcgaaacgcctgagtccctcttggaagagatcgagctcaatccattcctggtatagagccagagcctggttattgcaggttagctcctggaccagaacattgcttcgctcaatttcgtgcggatacataccaaagactcgtagtcgaaatcgcttttcgcgttgtagacgggcgtgcttccgttggtcccgacaccaccagccgggacatatggagcaggctcggcatggtaaagatttccatcactgggatatgatgtcgccccgggtgcaaccccaccgcgagagatgcttgttccgattgaagaagccgtcagtgcagatgtggtcgtcggtgttccagtaaacggtgtatacagcatggagctattgtaacttagaagtggcggcgctgaagccgatgcatttgcagtcggcaatggcgagtcagcggttgtagttccgccattttggtgtttctttggagaagcagccgtgaaaggcagtgagctcaataggctcaacagaatgatactgttccagatcatctctggtgaaggtcaaagtcgcttgaatccaagacagaaaaagaagctcctttatccctggtattaaagcattgggtcagttgtaattgttggaaagccggataggtacggaccttgcgtagagtacatatagtgctattttagccaatatcatcgccagccaaggcaatccaaagtcagggtcgttagaaaatcacacaatggtgaagacaccatcttcagagctaaatgtgggtagctttgaacggggatgaattccgaatggtgtttatcctcgtcagagcggacgttcttcgtatacttggctagtttagtagttgcaagatactgcaatccccacttagagaacaatccccgggatgctcggcaacagacgacatcggcgcactgccaacattccatggacctgaacagactaacgtacaattcgagataactgtgggggtggaaatcgaatccgaccggacaatgccggatagcgtttgagggaacaaggggaaaaggctatacggttcttagttaaaccatcagcaaaataaatatgtaacaatgagagtggtagaaatagaattgctctgtcgctggaatccatggagaggcagtctttcctatatagatagcccggaagtcgcagtacacaatgccagagcagtttatcaactcaactctataagtaccagatctcactgtgtccgccagccaccctctcccgaaaagtaaccataagtatcgcaatggggcacattggcagtaattctcacaccattagaccaaacaatctccatagtagagcccataatagtcgcggtaaaaggttcacgactctgcagggactggcggatgctttcgagctccttccaaggaatattgacgactgcaggggcccgttgaaatggaaccgccggttggccgcgagcattcttctcgaatacccatggctcaccgttgatcatgaatacaccagccagagaatcgccgttctggctggttagggatccgatccattgagtcatgactggatagtcagcgggcaactctgcaattttccaggaaaggtacttactggctttggggaatctcgggagctgtgagaagggagaaactaggaagggggttaggaagggggctagggaggatttgcttcttttgtggcacatttacatatctgtccagaagatgcgacgatgaggatttgccgtgtatcccggccggacatgcagagtttaccgctatatccatggtgtcatatctaaccataccatgaatggatgttccaattcaccgctcgttcttgttatgctgtagtgcttatgcggcttcttgaatctttgccgtatatgataggagcattgccgaaaagtggcttaagtttaaaagtgaggagtctttagccgagtataagagcaaatcatatcgagctatgattaaactctagaagtacgaagcacccgaataggaagtatacagacatatgacctgtcacaggctctagggcgaaagtggatcggcaagcgttcccgcacctaatttcctttctgtggggccttgcaatatatagctgggtgtgttctttgcttagcactctgtaatagccctgataatggtctggtattatcggtctgtagggttacggatattatcatcgggttactgagttaccaaagcgaccctaatcaaatacatcatgcaaatagaaccatattgggcagatgctgcagctactattacatgcaggctagacagctgcatggatcttcctagtcattaagaagctttgaataatttgaccaggctgctaaatgtttgtgtcaagtatgatggagttatgcagcaagtgggccaacatagactagaaatagtggagcgtatagcttgggttcttgtatattgttcccattcggcaatcagcgaggttatccgtgtagatcagaggcgaccttatatcaaattaactaaccgtgttcctgcaccagaaagactttgaaggtgacctataagctgtgagcagtggaccacgagtatcgcatatttgagctagcacctggaatgatcctgactatctgcgtcagaaccgttatccataaagcatcgaaatatcacaattctttggtgtgcatgggaaatctagatgtggatatcctgcatgctcaaaagagaaactatggagctgccctaaacttatgcaatattactaactccaatattcacaagcgttcgataaactcattccaacacacacatttgtaatatgtcgagatgaatggaaagtcggcgttgttgcatgaaatcggcgttcctccgtgatataatttattctcggcagcgtcgccgatccaaagcggggaaagagaaaccccagaatgccgatatcgcggggccttgatttctatagaagacatcctctcttctcttcatccaaaccatcaggttgcccaactaaccaccatggcccatcttcaagcatcgaatctattctcggtcaaggaccgggtggtcgtgatcaccggcggcggaagtggtaagaacctaattatatcacagatacaaacgtgtacatgtaagctaacagaaacacaggcctcggacgtatcatgactaaagccctggacgccaatgaagtctccaagatcttcatcctaggccgacgcgaagacgcgctacaagaaaccgtctcgcaaagcataaacggcaccatcatcccaatccaatgcgacatcacctcgaaagaatcactcgaggcagcctacaacgccatcgccgcccaaacaacacacgtcgacctcctaattgccaacagcggcataatgggtcccctcatgaagcccccgcaacccgcagcagacgggaccctcccgccgctgtcgcaagtacgcgatgaactcttcaatatccccatggaggagtttaacaaagtgatgaatgtaaatgttaccgggtcgtactacacggtgctggcgttcttgcctctgctggaggcggccaataagcgccgtcctgcgccgcagaaggatgttcttgctgccccgactgcgcaggttattatcactagctccattgctgggtttattcgcaaggtgccgttcagcttcgcgtataactcttccaaggccgctacgacccatctggtcaagatgctttcgacttcgtttgcttattacggtattcgggttaatggcatctcaccaggtctgtactactcggatatggccaatcatatcttccaggctgcgggtattgagggtcgcgcgatttctgacggctcatttccgagggacatgattcctgccactcgcggtggtagtgaggaggactttgcgggtttgattgtttggctggctagtaactcgggtggttatatcaatggtaatatcttagttactgatggtggtcggatttctgtttgccctgctgtgtactaagtggggttttgttcaggccgagtgcagtttgggtatacagctgtactgagcttcaatgaaaatagagatatgtagagttcttggtttccagatatgaatgtttaaacgctcatgagtaaaggcaaatgaaaacacgaaacgaaaatgaccttcgcaggccaatctcaaggtcatggtttgactattcagtaagtcgccgtcaatcgctggaccagataatcgcctgaagtaatcggcgagtattttttggccacttggatttcctcgccaaaagtccccggcagcgcttcaataagtttatcgttgttaggctggcagaaatacgctatgctgtaccgagcaggatagtccgaagcatcatccccagagccctcggggacgggtggctgaattactcggtgacgggtactcttgatagtgtcattggaccatcgggcaagcagatccccagcattgacaacaatagcatcagcgatgggagttgcatccacaaaggttcccttggggctgcgcacttgcagaccgccgtgtcgatcctggaaaagcagagtgattgaaccatagtcgctgtgctcgccggcacggacttggttagggttatttttgaagacttctttgctgacagaaggatagtgaagcagacggaggttattgtcaccggcattgacagagtcgtcgaagaagtgctccggcaaattcattcccaatgcaatggcctgcatgatatgtttatgtagggtctttcccatttcaaagaatgactgcatggtttttttgaaatcttttccttcgtcgtcgagatgatcgggccagcgattgggcaggccttcgactccctcacgaccaagttccatagtctccttgatgtccggcgcggacgcacgaagagtgtcgacgccagttgtctcgtcgacggtggttaacttctcccgcccgatagcgacgtaaccacggttcgactgcggggtcgtccagcccagggaatccttttcactctgggggcgggcgaagaaacgggcagatgacgcaaacaccccggacaccacggatggcggaatgccatgtgccttcagataaaggaagccggatgttttgaaggcttcggttatggagagagcgacggcatgtttatcggatggggtccccgtgaagaatgggccgaagtcgatcagctagagcagatctcattagtcgtggcttggaataaccagagacagagcatactggtatcttcaaatcatccttatctaccgcggcagacgcttgattgtcgggggtgttggaggtcattgcgtacacggcttcggggaatttgtatgaactctgttgctgtaagaaggcaccgagacagtgacagaagcctgtaaagcgagtgcacgaatggaaagaaaagatctcaagaagaggggaaagtcggagaaggggaatatcataggtcggcggcatacatcgacagataagcgtggatggctgggcagataagccagaagataagcgtttatattcgatttgttggagatttgactgtttgtatcgtcgaaggaatgttatcaggccatttggtttgattgctgtacatttgatcgtgaactgacagcgcagatcaagcccacatcccccactcctccccagtgacccctaccgacatagatcttcgcatctcaaagctgaaaagagggcgcatcaaagaactaaatacgctgctgacatacagtgatgaatggcgacaagactcccccgaggaacaaacggtgcgattccacatcttttaccacaacagtcgaactaggaagccatgtggcatctctgtcctccacgagcttcgtgactatacaatcctttccgctatgagttctcaactgagcggctattccattgaccgcaagaacggtaacaggagcaacaaacccgtatgggtcctctgtagacttcataaacgcaatggaatcaggaaatccggcagccaggaggttcccatctgcatcgagggacagattatcgatcgggtatcccgtataaatcttgtcaacttgaatcagctgctcgccaaccaatttgtgaacagtgacggctccagtcactgaatgagccacatagtagagcccgttctcctggacgatgccattggcaaaagaaaagcctttgtcggcagcgacatggcactctccggtgtcagatcgacaataggtgaggcttccttcgccaatcaacattcctaacgccgcgaaagtgctgaccttggcgtcgtggtcgttggtaattacgatccccaagccatccttgtcaacggccaagttgttaggcgagatgatcgcgtcactggctatagtcttgacatactcaagtgtctctgaggcatcgttcaaatcgaacatgtcaattgtggaattcgctccaacggcccaagcatcaaggaacttccctgttgtaggttcgattgggggtctatgattgatcaaccagaatcgaagtctgccgtcaacactgcgcacgtcaaatccatgtagatccagattgccgaggtagccactgattttcagctgatggaggccatacagcccgtccgggccgggttggtcaatattcaacactgcgatatgatccgtgcgagatctcgcggagatgttgtattttctgccacccggactccatccctgcctggactgtatatttccgcatgctgcgtacagtttcctcccttgatcatctagccacatatcctcacatccttctaagagagggtgctggaggcgagtgcaggtccatgggaattcttcaattggttggatctctcggccgatgccgattgtgagaaagataatgttgtgcaaataggctttgtaaaaaattcccagggcgagcacaatcacggcccatctcacagctcgaaggctgataattcgagccattgtgaaggttgggataaatgatgggccgatgccttgatgcctgatttggacctggttcctggccgcttcctaactaactatagttaactagtgaccgctcttcatttgttactctgccggtcttcattcaggcatccaggccaaacacaggcaccaaggcatcattatttactccaaatgaaggtttgaccccgccaaggttccaaggttaggcggggctagtcaaccttactaatccttggtgccgatgtataactacggaggattaaccctttttattggttccaagacgaataaaatgagcatgaggtagttatgcgttgaacatgctcatgctttatgtcttggatctgcttgtcctccgtactctgcatatcaccaaggcctcggccctccacctcgaaggttccaaatgtccacttgcacattaataagctgattgggaatcactccacggacctcggtagtagctaaaaccccaaggcttccttcatcacctccatttccaatatacactatctctccctttttcattcaaatacctctctcgccaaaatgacacacactgtccttgttatgtacccgaacgaagtcgacgtccactttgacgagacctactacatgaaaacccacgtgccactcatcgaaaacatctggaagagccacggcctgatcagctggcatgtcaccaagttcaccaccgcgcttgatggttcgcgacctcagtatctggtgatcaccactctccagtgggagagcgaggagtccgtgaaagctgctctgcagaaccctgccagtgcgggggtgtttgccgatgtgcccaacttcaccaacgtgaagcctatcactctggctggttccgagctctagtgttcatgagtgtatgtcaaattgcatgttgatgattgcttcagcgctgaaattgatagttgccaatgaatgaaatgggaatggattataaccgagtcttgaaggccttggcatttttaatgataagctgtatatctcctctatcaagcgatagcacattcaaattgcattcctcttctgtacgtaacatcaaaagaccacagaccagacttatcggagataaagggattgtaacatctccgcgcttcagaggggcgtccccgctcaacagctcttatctattcctcccctcacttggatatccgaacttggatacccctgcctctctcttcttcttctcttttctcgattctatctgtattcccaaatatgtcgcgccctctagtagtcgatgtccacacccatgtgtaccctccatcgtacatggcgatgctacgcgctcgcaagacagtcccctacatccacgacccagcgagcggagaaccgcgcctgataattctgtcatcagacgatgacccatccattccaatcgacgagcgcggccgtcccgtcgacacatcctactccgacatcaatgtcaagctaaccttcatgcaacaacatggcattgactgcagcgtgatctctctcgcaaatccctggctagacttcctcgatcccgccgaagcccaacaatgggccgagcgcatcaacaacgatctagaggaaacctgtgcccagaacaataagtccactgacccggacaacaccctccctctgcaggggaggtcaactttgtttgcatttgcgactttgccgctgagcgcacccagtgcggatatcatcgttaacgaaatcaagagacttaagaccctgcctcacatacgcggcgtgattatggggacctccgggctgggaaatggtctcgatgatgaagcgctgggtccggtttgggctgctctggaggaaacgcagttccttctcttcttgcatcctcattacggtctccctgatgaggcctttggtggtcccgaggtaacaaagcgctacggccatgtcctccccctggcgctgggattcccgcttgagaccaccattgcggttacccgcatgctgctgtcccgtgtctttgacaaattcccgcggctgcaaatcctgctggcgcattcgggtggtacgttgccgtttttggcggggcgcatcgagagctgtattatgcatgaacggaagtttgtggagaatggtggcgatgtccctggtccgcaaaggagtatttgggaggtcttgaagacaaatatcttccttgatgctgtcgtctatggggctgctgggctcaaggctgctgttgctgccgggggaggtactgatcgtcttatgtttggtatgttctcatatatatttttggtaggtggactcaagctaatataacataggtaccgatcatccgttcttcccgcctctaaatgagggcgagaaggaatggatcagtgtgacaacaaattataaagctattgatgcgactttcgagggggaaaaagaggctgtggctgctgttttgggtgacaatgcggttcgtgttttgaaacttgaataagcacatatactatctagcataaatatcgctatacggtctgtagatataataccaatagcaatgaggtataaaggagcacagtgaacaaacataagacaaatgtagtcatgatctcaggctttaggttggagcaaccacggtcctcaacacatcccaaccaacaagccgccacagctcctgtgtaagccaatccgaaaactctctctgatccatctgtttattctcaagtacctgaggaggcggagtatgcggacgccgcaggccctcccgaaacagatgatcatcaggtccgaatacagcccggaggagagacttttgcagacgatctttggcttttgtgacaaactgccgagcagccgatgcctcgaggggtgattgacgggactcggcattaagcattctatccagaagccgaatcagatacttggcttccagttgtgcctcgttcggcccaagacactcgtcagtcattgcctccagtccgtctgggaacgtcatcccggggcagatgcccattggcaatcgcaggtcatggaacacgtgaagagctagcattttgcccattcgatcaatgacaaggaagagaaacccttccattacttcctggtcttcggtgcgcgtgagattgagggagagggccatcgtgcagagcaggtctgcaaggcgaaaggttatttcattcttggtagctaagctgttcgcttttggacgtttgctttgttcttcgggttgcgtggtaggctttgggtctccactcgattttgtgtttttggtgactggcttttgcttggatattgaagtacaatgcaaagtgagtgctctcatggttgattcgaacagacctactaagtagtaaatgacttggccttggtgctgcattctattcttggctccgccaatcttgtgcaatgctttgtgtgtgagatggaaagcaactgtcacaccattcataacatcatgtgtatccggcatgttggcttgccctgtctgagaaggtttctgctctgtcatactgctctccctctggatagtttggatcagtttttgctctgcggatttgcagaggatgactgccttcacggccagagaattagcctcagagctgctagttgtccttctttgcagggctttttgaacggtatgcagatgcctattgagacataagactgtaatgacattagttatcatcatagtcggtcgatgaaaggggaatcaaataccatcctcttctcctgaatcatcatcatccatcaatggtatgcttttctgcatattttttggtagctttatgcgtttcttggccatgtttgaactattcgtattcttgccaacagcagacgccttgcgtttgtttgccggcaagctctcattgtcatttgcagtgccattgacacgcagtttgacaagaaggccttcaatacgctggttaagctcatggacttgatcttgtagcttgctctgtcctgcctcggaccgttcgtatgcctgttgccagaaagagacgctatcgaagaacttgtctgttgcaacaatttggcccaagtccttggtctttttaatgaaatgccgaatctgcaaaatgtattctaaaatgtatagtcaataatcgaatggtctgagtctgtaaaggttggatcttcgcctaacctttcacgctttgccctggtggttttcccttgacaacagccaatgccagtgctaattgaagctgagttggaggtgtaatactaagtttagatgttgatatggttgtcatcttgtcaattggctcgaatggattatggctcttggtaaaagagctaccacctacaggttgagagtagaaactcaagatgcacacgtgcccaggcattatatatctctacctcgatcgtacaattttagtcgtaataaaaaccagactcaatttttgaaaaatttaaggccaaagcctgacgaaattccgaattctgaatgctttgtttcaattcagcagcttaaataacagatttgctgattatttcccaattaggatctcatagtatactggttggcggcctgaggcgaaacgcatccaccgcccaagctctgaactcgaacctacaagtttcaatctcaacaacaacctcagttcaagagctctaatctagggttaatttcctctcgggactatcactgtgctctttataaccttacgccctgatagagcaaccacatagccgaaaaccgccacatcaaactctccacttcatctccgcaaacttccaaggcgacaccagtcgcataaaccaccaagatgccaaacgacgatctcaaggcgcacgccgcctcgaaccaagatttctacgccctgctagacatccaaccagcagccactgaaaccgaaatccgccgcgcatatcgccgcaccgcactaaagtaccacccggacaaaatcaaaaaccccaccgcagcagacatcgacaaattccattttctccagattgcctacgatgtcctctccgacacatcagtgcggcagctctacgacaatgcgcgggaagcgcgggtgcgtaaacagcgcgagcgggacatgatgggagcggcgaaacgaaagatgcgcgaagacctagaagcgcgggagagggcaggcgccgccgaaataggcagcgccggtgtcaagcaaggtgtcaagagatcatgggggacggacggggacgaggatgcggaagagaagctgcagcgggagattgacaggattgcggaggatgggcggcggaggcgacgcgaggctgaggagaaggctaagaaggagcttgaggatgaacggaagaagattcaacagcaggaagaggaggctcgcaaggcggcggatcggagtagccagcgcgtggatcgctcgaaggagggtggtggcgcgcaagtccccgagctcgagcgtgcggtgaaagtgcgctgggtgcgggagggtcgtgggttggagcttgatattgaacagcttgcggtgctgttcaagccgttcggaacgatcgagaatacccttgcgcttaaagataaacgccaacggattggagacaacaaggagaagaagactgttgcaacgggcgtggtggttttcacgtctattgtgagcgcccataccgccgttctcgatagcgagaaaaagcttcgtcaacatgctggtcaagatggcgaatggggccttatcgagtctgtcttctgggcctccggcaaccaacctgatctaggtcctggtatatcacccaagcccgaccaggctgtgcctgcacctccaccaccagggccctctgtcgacacttccagcaagcctactaaatcatcattcaacttccagggcttgaaaacagcacccccacctgacaaagcgccctcgtttggttcattcgcttctgcagctgctgcggcagctgccccgagtgcaacgtcattcaacccatccactcaggctccagccgcgccaagtctgcaggaggtgatgatgatgcggctgaagagtgcacagcgtgagaaggagcgcaaagctctcgaagaagagatgctacgagaagacgaggccgcagacgcagcggcagcagcggcagcgaagggcacctagctctcccatggaggctagcttcatttctgcatatttgaaaaggttgatcctaattctaccattgtatttagattcaaaagataccccagagcacgttgtatttgcaacgttgagttgaatagagatacaaaagctatttacatgtgacattttgtgctgtgttatattatacatgtgtagtgagtatacacttagaaacctcagtctcggtgcgattcggcttcctcttcctcttcctctaattgctcctcttctgcttcacgatcacggggagcgggtttctcctctttgccacccgagatgaactctctaagccaaggcggaacgaaagctcgtattccgacctcattaggctgttcgacttccggagcccaggatagcttgaagtggtgttcatgaggacgagcaggagcctcacccatgagcgcaacatcggtcataacttcaagacggcacagcgcaagtccaatattgccaacgccatgaaggaacgttcccgcactgcggcctcggcgggtagtggcaccagccttaataatatctgcttcaccagaaggtaaagccaattggaaagatggatcatatgtgagagtatccggggcactttgcccatcctgacccaaatcataaagctgaactggcaaaagacgcttccgcgtaacgccacggtggtgggtgcgaatcgtcaattcctggccgacataacagcccttgcggaaatcaataccgccagccatatccatattgcactgcaaaggcaaagccgatccactaataacctccgcctggccctccgcaacgccgtgtagaaagcgacggacggtgtatgagtccagcgacacctcggacccgacgacctgagcctcatccgggaagtgggtgcgcagactgtccgagccaggcgtaataatgcgggatccgaagcccggagcacgcgtgtcaatgcaaccggcaatttcggaggtaggtgagaatggtgacggcgattctgactctagactgtatgaagcccaccgttgcggctcggcgtggttcttccaggaggaccatattgtgcgctcgccttcctctagagcgcggagcttgagcttcgcgcgcagcttgtgtttcttgaggtgcttcagcaggacggggacctggtttttgtctacctccactagccagcctgactcggcaccctgggcctctgcgccggggagcgggtaaatgaaggcatcgttcagaactcggccttgcgaattgaggaatgcggtgtatgcgcctgtgcgtcgaatatttcgtttcggatcgttggggactagcatattctgggtcatcagaccctggaggaaggttgtgctgtcgatgccggtgatggagatcagtccgcggtttgtgagtcggctgtaccctgctgtcggcgggaggggcgcattttgactctgttcggtacgctgtgctgtggtggagaatagcctggggcggaccaggcagcggccacagaccgtggggcgcgggcgcatcatggctgagttggtgtagcggagccaatgtgagttaatctatttctttacaaagctcgatgacgttgggcggtgaaccgtggcagtaagaaaggttattactccttccgccctgaataattccaaagtctagaagctacaattattctgaaggtgtaaaaaactaattaattccaatactacactatttctatgtatgtcacatgtgcctatctaggggctactgcaaagccacctaggtaagcttgtaaccggccgaccacggagctacttattgctcttggccactccctccaagaacccaagcaagaacgccttgttgctcggagaagaaacctgctgactattggtgtgtgcgccagcatcagatggtgtaccatgccgagaaatagaatcaccgctgctcggacgattgcgggacgaaattgggctgacaaaacccgagaatgctgccggctgctggttgacagctcgggagtcgaacgcggtcgtagaaacgggcgacggagagacaggcgctttactaaagagagacaaaagtgaagctttctgctcagcagtttgactcggtcgacggtcaaagttgctctgtgcggctaggccctggatatcgatcccaacacctggcaaactcaatttgcgttcaatagcttctgtctgaggagctgtggccattaatgcttcatatccgggtttttctgaccgacgcagaatctgcggctggaaattcctgataggttcaggcgcctcgggtattttcgcaggcagaacctgggttgcttgtgcaacgggtctcgacgaggatacctcccgtttggcagaatggggtcgcgatagaatggtaatcggtgaggatagctgctggagctggggttgctctcgccggttcacgtggttctttcggtttgttccagtgtttgacttaggtggttggccatatgtctcaaattgtggcacgttcaacggtccagacacggtagccgatgtctgacctgctcccggaaggcttctcgttgcggcaatctggtgcgtgggttggtgatcgcgaggacgctgaagaatctgcttctctgaaggtgccgcagagggttcaacgggattgcctaacaattccgctggttcagaaacacgagcagtttgcgcacccttgagcaaacccaaaagactatcctggtgctgagacgtcttacgtgtgtgagaagagccctgcatgggagccgccaacttcgctggacccgggcccttgggggtcttaaccttgaaggcttccaagagcgccagggaatggcttgtgagcttcggtggaggcaatttgctcgccggtgggacgactgggccccgggtttgagataactgagcggattcagaaaactcagggtctcctgtccgttgaaacggtgcgggcatatggctcgggttcagaacgccaggggccataggaggctgattatggtgctgatattgagacatagtggtggtttgggggaattgtggtatcgcgttaggtttaggataccaattaggcgcactggtcgggaatgcatcgccgggaagagcttgtgggccattcaagaagtgctggatatgaggttgggatgggacggtgtggaatggtgtggagttctgccgcatgaaaggagacggacccatgttctgctgctgctgagggaagccggggaagaaattaggacccaaatgaggccgttgttctgcagattggacgttggactgagatgcattaggtggcgccatagcattaccaagagaatcccgaggggatgtctcttgacgcccacgctgcaacaaagcaaggagcccactcgccttggatgggtcaacgacagaagcccgagctggctcggagcctggtgtattaacttgcgccggtgcggcgcagatgttcaaaaggcgtttgaggtgatccgaagcatcttgcgctgaggtcacctcaggaagatcacttggaatggccatttttgcgagggacatccctggagtgccattgttagggccattctcatccatagaaagatatccctcagcctgtgcaacttggtttgctctcgcatcaagcttcttctgctgcgctatccactttttcagtgggctgagaaacggggcaaccatgtagaacttgttcgcatttgcgactgcaagtccttcatcgtgctgtttatttttcttcagcgttggcagctctgaaagcttgtaccactcaatcttgctgatttcctttcgagtacgcggttcaaagtaagtatcacggagcacacctcgaaagacgtagagtcgcatatgctgctctctcatcgtaatctcaatgtatttaacgtcgtcgtcgtttttaaccaagttggcctcccgaacatcgaacccagtctcttcatagacctcacgaatagcacaatcaagatccttttcgcccttgttgattttaccacggggaaaactccagttggcgcccttcttccagcccttaaccaaaacaacctcgtccatatcttggttcaacatgattgcaccgcggaccggcacgcgcgtcttgtaatcaaggaattcttggaaggcagccaaatgatggtaatgagaccatgacgacataagcgggcaatgttggaaaatgcgcatagcaaatgtcttcaagttcattgacggtagcgcggggtcaagcggacgaatgaagtcttcgtagaaccattgtgcttcttcaacttgaaaacatatccgttcaaccgactcaagctcctcgcgcggaagattgataatgaaacggacgcacaaatcatccagccctgtcagcaacggcccaccggcctcagtcagcagcccgtcgtcattccgatcgatcaaccaggcactcacaatcttctaaccgcatatttgtttcgatcatatcggtaggtagactctggcatttcaaacccttggtggctgagaaataactgctcactcaatccgacagcgcaaacggtcgaaataagcaagcaacagggtggagggaacagcttccagggagggtgggccaacccagggctgtgtggatatggtgaatggaatatggcggagaataatctcagcaggaagtacagtatgcgaaagcagtcgaggttccaatcaagtcagagaaaagagttgaggtgttgggaagcagagcaatgatcggagctgcccaagatggtgatcgggtgactaaggtaatgtgtggcggtgatgaaccaaaataatgtgccacatatgaatgtggctgtgctgtgggttccaagattctcgggttatgacgtgttgtcgcgctacctgactgttgatctcctggtgttttttgggaattgctatattaatcctcctcgtttcatagtcaagcaccttcctcaaaaatccttacgcgccctttatcttcgctgaatataggtgaaacgagcgcctaccgaaacacctatctatccaaccaggaagcgtttggggcctgaaaggatcaaaggctatatgtgcattgtttattttagttgcccttgctcaacattcgtctatttcttcagcccttctcccgtgaagatttcaatttctgcaactacttttatctcacggttgatctaaaacaaagatgtcgaaaattctagtgtctctgattagcaaaaaggtgctaggtgaaaccgccaataatcatttcggtactgaggtgagtccacttgaccgaccgacattcatttggttttgcgaagggaggtcaggctaacccaatattttctatctgcccaggacccctacttcgaagaagttcctgcttcacgccttggtcgtacatttggaaaaaagactcaaaagcgtcgcaaggccatcccgccggggctctctgagcatgatgccaaggtcctgaccaaggtcaaacgcagagcttaccagctggactatgctcttttcagcttgtgcggaatccgcttcggctggggaagtgtgattggactaattccattgtgagtttcaccaggatctatcacactagcaccgggaggagaccaattctaacaaatgaacaacagcattggcgatattggcgacgctgcgctcgcgatgatggttgtgaaatcttgcgaaggaattgaaggtggacttcctgctgctttgcgcatgaagatgttgatcaatgtgattctcgacttcgtccttggcctcgtccccttcattggtgatcttgccgatgcagtgtacaaagcgaatacccgaaatgcagtcattctcgaaactcatctgcgccaaaagggtgccaaggcggcctcgcggcagggcgaaagaaggcaggaccgagtagtggaagtcgacaatagtcttcccgatacatttgacagacaagaagatggagtcgtgggtggccgtccaccggcctatgacgatgtgcgaccttcaggtcatgggggaaggggtaacgatgccccccagccggccaaacagtcccggaacaagtcatttggcagatggttcggcggtgcggatcatccagaacatgatttggagcgaggtggagcgaggtaatgcatggtgcatgaatatattgaaatcgtaattccagataccccaagattgtttgtcgattattttaggtaatgcgggatgttcgccgttagttagttcatttaattttgtcacgaatcaagaatgtttgtcttcagcaaagctcccctggtcgagacctcatacatccgtagcagaattgagagctgtggttatcctctgcctgattcgcaacagtaactccggaattaccctgaacatttcccactaggctagcacaaagagcacacgttggtgcattatcagacgtggaggggttcagcttgtttgcagttctggccacattcgccatgacacctggatactttgcaccttggttctggacatatcgcagcatcaactcgtcaatagagaggttcttggtaaggacattttcggagggcggttgatcaggtatgacgatatcagagagctcggcacagacgctcgcatattgaagtaactcagccttatacagatcacggagcgggtactcgaaccgcacgccccaaggagacatgccgtcagatacctgccaggtgagggaagccccacgtcccttggcgacacccgcaagtgctttcgcagccagacggctgtccgagtcaccccaaatcacagattcacagccagactttttcgcaaattcaacgatcaatctggtcagcaagacggtgtcaacgtcggccctagaagtaggggtggaaatggatgcacggaaggcagctaagcggtcttcattcgaccgagtgctgtcatctgtgaattttgatcccgcatattcctgcatgatatcttccacttccgggacatagtcgaagatgctatgaaaaggtatccgactgatagtgtgcatcgggaaattcttttcaagagcttcgtagttcttatcgaatggaacgcctgtagccgcaacagttgaaggttcgatgatcaggatcttgaagtcgtatcccagcgggcgtccattgtccaggcgatgttgtcgatcggtattcaatatatgcaacaagaccgaggaggaaacaccaaaagacacaggcagaagcaactgggttttagggccatccaagccaaaagctctatagacactcaagcgcgactgaactttgtgtgctatgaagcgcctaaagcaggagctagagaaaaaaattaagtcagaaactatgagctggaggggttgtagattgtcgacttgtcgcatacctgcaaagctgcctcttccgggcaatgaggtcgaattctgcatccttgcattccatgcatgacttgctcagttcctttgctggcataatgactgctctagagtatggggctattcaacctggactctgcactcgatattgaaaaaaagtcgaccaaagctggaaactaaaaaatggtggcggtgcccgcttagataatggccacgcgcggcttccccggtttagggccatcgggttaaagaagaacaccttagccttacaaccctttttctaaacacgccttaccatattcggctctctttattcttgctcatattcctttatttgatgctgtgtggtcttaaaggcctcatcctgaatctcggagcatagtctcgcttcaactctacggtcgccatgaagggctggctccagacattgggcttgacggccctattggcaagctatgcgcttgctaatgacgctgaactagtatgtccctgcactccactatgggaaattgtcagggtctaacgttgttctgcagaaatccgatgatgcgcaccgacaacgatgctcagggatgtacagtcgcaaggcttggggaggagatgttgatcccttcattttggtgaaatttaccaagtcggaagctcaggaaagtgatcctttggctagtttggtaatcttcgaatggtccgatgagggattgattggccaataccggtccggcgatgctgaggtatgtctgtcaacttcatggggacaaccgacgcggctaattattggatttaggtcaaggaaacaatttgcgatgcctccaatgttgaggcaaaaatatgcactcaagaacagctcggctcttttgttctcaccagcaatgccactgacgtctccaaaagcccaatcatatcgaaagcaatccacctcaacaaccccgacgccgtgaaataccctgtcagaaagactggattctactgcgttagcacgtatgcatactccgggcaggactacaaagcagtggttaccttccgaaactcatacggcgaacttcccgctgcacaaatcgcaaagcttccattttatggagccttgacgatcgtgtacgctgttattggagcgtatgtaacttgcaaaatcgacggactcgataggttttgaactaaatgcttacgcgtaactttagattttgggccttcctttacgtgcagaaccgttatgacatttgtatgttgggttcccttctaccatccgagccatgctaatactggatagtgcccgtccaaaactatatcaccgcaattgtggtgttcctgatcgtcgagcagctgatgacgtggggattctatggtaagagacaacaattgattccttgcttgacttcttctgatttttctagaataccaaaaccgccatggtctgaatggcggcgcaaaggcccttatggtcattgtagcagtgctcaatgcgggcagaaatgctttctctttcttcctcctcctaattgtctgcatgggctacggcgtggtcaagcattcattgggccgtaccatgatctatgttcgcattttggccattggtcactttgtgttcgcggtcgtctactcggttgccagtctttcgatcacccctgatagcgccggtcctctagtgcttctgattgttctgccccttgccggaaccttgacagctttctacgtgtggaccttgaattccctgaacgcaacgatgaaggatcttattgacagaaagcaaaagacaaaggcgatgatgtacaagaagctgtggtggtgcatcctcggcagcatcattgtgatctttggtttcttcttcatcaactcattcgctttcgctggacgcagtgacgccagctttgtgcccgaacactggaaggcgagatggttcgttcttgatggctggttaaacctggtttacttgttcgatatcgcatttgtggcttatctgtggcgaccaactgtcaacaaccgccgcttcgccatgagtgatgaggtatggagctcttccctacatatacaagagcagaatcgagatgctaacatcccttacagcttgctcaagatgacgatggattcgagattcgatcattcggcagtggtttggatgaagaagatgcctatgatgctcccccggattatcctggcagctcagccgccgagggccgtgatctctccccagttcctcccaagcccttttcctccgcaccccgccatcgcgagtcgctcgacgaagagacaatattcgcagtcggcgaagaggatgctgagaggtggtctgatgatgaagagtctcctcgcaattcaagcgagagacagagactcaccggcaaggacaaggattaaactgaacattgactcgtctttttttttaatacggtcgttttccctggttagtgtaaaagccgatcaggaccagatatctggtagattgatggggttgtcatttcacttaatgtacaacctgcctccagggcaaggatgcaagcatatcatggcgttggtctttgcttcacacttatgtcaaatacttagttctcctagctctctttttatttatattattggcttatatcgtgttgcttggccacgttcttggatcaagttaataaaatagcgcaggttacatctttgtggctatacggtatgaatttatccgaatccgaattcaaaacacagcccactatcactgtctagtatcattctcatttcttttgcaactccaaacatccgactatggatttcgatcatattgctgagaataagaatgaacagaaggctactatttggttgaaactttggtcaagccgaagcccagaaatcttgtctatacagcttgctaagaagcatcgcctagtaaacctgcatctgcacacaatccacgtcgctttcatgaagctgcagtaccctgatttagcttaagggcaacctgacctagtcaaatagtggatttacctcgaggacataccttccaacagttcggagtcttcatagtaataaccgcagcacaatgtcaaatcgatttaccaataacccgatgtatttggccaaggatgatatccgagacgttatattgagaaccctttgaaggggctttcttgtctttttaggtttttttatagctagaaccttctataactaaggttcgaacctggaggccctggatttgagtcatccggagagcctcaagtggacctcgggagccccagtctctctcgtctttcaagatataaattgatcatttcagtataccatatttccaagctgaacaggactttgaaatgttttgactacataagaaccgataaaagcagtcttatcgcacttgccccacgaaccatcaaaacaacagctccgactctcagacaacacacacaacaacattagcagacgcctcacctgcatatgcaaggcaatatcaccatcttcaaacatcacatgcctgtagccagtgcctaagcacacacaatggcatccgagacgcacccccacgtccccgcaaacccatcctccatttcagacaaagaaagcgacaacgacaacgcaagcacagccaccgcaaagccagaaccccaaacaacagaacccagctccagggctagcacgaccctctcagcccagctgaatcaagaatgtaacgacctactctcccagatcgacacctaccaatccctccttgcgaccacgctacggaacccacagcttgtcgaggtgcgccaattccgctccagcgtagcctccgagctgaggatgctggagaagctaggacggcagatcgagggggcgattggagggacaaccgcgggaccggaaacaagtcgaatggaagatggggtgacggggtcgcgtgatcctgatttggaaatgcggcttgtgcatgcgcttcgctcgtccaatttgccgttctaccaggctgtctggaggatcgcgagcgggtcttgttctgggttggttgcgctgggtaaaaggttttactgggatggggagacgaaggcgacagagaggaagagtgctagagggaaggggaaggggaagggtgagggtgctgcgcagccagagaagcagcctaacaaagataagcgcaagagtgtgtttgtggatattgtggctgacgatggagaggagtgggtcaaggtgtctactgtctcggagagccggcttttgttcgagatggcaaagaagggctgggagggtgatagtgatgatgatgagtggtctgacggaggtaaaagacggactattttgcagaattttgatgaagatgggaatgaggatgacgatgatgagttagagctcattaaactcgcccgggatctaaagaaggcgtctgacgctacgcgcgttaaatataaacatcctcggctacgggttgttatacctaagattgaagagggaagtgttcctgagattgatgctgtcttgaacgagatgcggagctatggtattcgggttgactgccaggggaatctgccagcagagactcgcaccgggctagaccatctgctgcctcaaccgttcaaaaacttcacttcgactctgaatgtcgactgcactttactccttgccttggtgtctgacttgtctcatatcaaggacatcccgccaccaccctatgtccatagagccatcgttcgacaaatcgaagttgagcgggaaaaaccactgctcacttctgagctttggccggctatggatggtcgcgagctcgtatccacgacagaggctgcagtgcgcttccgggaaattgtcggaatcattgggacagagacggaaaagagccggactcgcatgttgctgggagatccaccatacgaacaactcgatcgtgaggctgttctccagaagtttcaagaattgtctgattatcaggtgcccacaaattggaaaatacccatcaaagtggttgcagcccagccagtcattgacgcggccaagacacaaggtcacctttatccagtggtacatgaagttggacaaggcctatcggacatcaatcagagcgtgtttttgtacggttgggtcaccggtttgacaaccatttccagcaatcgcacaattgacaaacaaatcgaggccaccgttgaggacaacaggaaaggcgatgatgacctaagaggccctgacgtttggatctgtgacacggcacgaagtttggtgggcaaggacaaagatcgaaaagtataagcatagaggttcggtcatctgctagacggttgggatagaaggcgcttttcttgacgttgacaatttctgaacatggtgccattgttctgctgggcatccaatcatgcagtatgttttatacaacgattggctgagagtttgagagaaaatcggagaacttggtcctttccatcgcgctatcagattttatttacttctctgaagatttgccgtggtcgtcagggacatagaagatgatttccttgtcggcactggcgatcatattgtaacgcgggttgtattccaccatggccgcgcgatttggagcagacaacctggccgagggctgcagtgtgatatccccccgggcgatctgtcccaagtcccacacgagcataccgtgttgatcaccattgcctccaataacgtatcgaccatcgggagtgaaacaggcgtcgccttgtccgagcggcttgccggtcgtagacaccggtgcagcacgaccagatgatccactcttgccttctaggaaagccttgagtgtaccatcaaaggcatctagaataaagtgaccatggtagtccgttccaagcatcaaatattttccatcattggaaaactccaatcgagtccatgctcgtcctcgcgttgacggtgtgaatctctcctcgtattgtgcaaggtcgaaggtggagaagggcgacttgtcaaagttgcggaagtcgtaaagaaggattgaagctgtggattgagaggcgattgcaatgactgtacccgaagggtcaaaggcagcaaggtatggtgtcgcaaggttgagctttccctgcgggttcctggaattcaggtcccacaatgtcacagtatcgtccttggagcacgacatgaaggcgtcgctggccggggattgagccagacaagttacttggtcgttattgccagtgaaatatcgtatgtatccctcgttgtgaagatccagtagccgcaaattatctgtcaatggtgagctgggtagccaaaagcaaaggcattcagtcgcatactatcaatcttggtactcgcgtgaaggacctggcgagagtgatgggtgaatcgcgcaagatgaacaccgtatttcttgctggcaaccgatttattgtatttgccctctttcacgtcataaacatgcatactatcatcgttcccggctccgatcagaacgtcgccctggtcatcaaagtccaaagaggtcacgtatttggacgggtcttttttacaagggtggaacccctacagaataatcatatcagaatggtgccacagtcccaacattcaattggacataccttggatggtctgaaggtgtcaatgatatccgtgattttctgcgacttgaggggagcttgggcggggaccggaccctgctgaggtgttgattggctttcagccatggcggtatggtcggtgaagggtccttaagatatattatatgaaggaattgcagattgcgaataataagagcttgacgggaacgtgaaaaagaggcaaaaaatacatagaactgataagctccaaattgaagctccgcgactgggtatttttgcgcgcctcaccgcctcggctgacataagaattccggggccgacgccggaggccccaggctcaattgaccaatgagcgtttcaccgagtcccagttcgccgcatgtaagcttttatgtccacggttatctcagggcgcgtcttgactcaacttctgcaatatctggccctaggtgaaaatattgtgcattcgttcatattactcacctatacttcaaattgcgacttggctatacagcctcaataaattgcacatatcccgtggaatctccgctactggccgcatttattttgtccaggtccgatattcctccgctaaccgacaaatctgcgcaagtcacatataaggcgctatgtctactactgcggggtatgttatgtctaagtgtgggatatatacaaagcctgcgctaacagcaattgtggttaaacagcgcgttcatcgcaggtggcattgcagcatgcggtgcagtcacggtcacccatagtttcgagacggttaagattcggttggtttcctgatactccggatatgctaccattatactgactataattggttccaagccttcaactgcagggtgaattgcagaacaagaatcaggcagtgaagatgtacaagggccctttacacggcatcaaagtcattttacagaatgaaggacctcggggtctgttccgaggtattggatctgctgtatgtgatgtcctctccaaatggcatataaagacgcattgatctaacattcaggtcatgtagtatatctaccaggtcttgcttaacggctgccgtctgggcttctacgaacctatccgcgcaaacctcacaaatgctatatacaaagatcccaaggtccaatccctcggtgccaatgtcgttgcaggagctgcttcgggtgtcattggtgctgcagcagggtcgcctttcttccttgtgaagacccgtcttcagtcctactcgccgttcctccccgtcggcacccagcacaactataaaaactcctttgatggccttagcaagatctacaagagcgagggtattaggggcatataccgtggtgtcgatgctgctatgatccgcaccagtttcggcagtgccgtgcagctccccacatatttctttgccaagcgccgtttgacccgccacctgggcatgaaggagggtcctgctttgcatctggctagtagtgcagcgtctggatttgttgtgtgctgctgcatgcacccccctggtatgctatcttgaacatggggctatacgttcttcgctgactttcactctagacacgatcatggctcgtatgtacaaccagacaggaaacctctacggtggtgtgtttgattgcttgctcaagactatccgcaccgagggtccacttgccatttacaagggcttcttcgcccatctcgcccgtatccttccccacaccgtaagtgacaggagttgagccttgctttggtattattcatgtactaaccccacttctagatcttgaccctgagtctggctgagcagactaacaagctgatgcgccgtgtcgagaaccggatcctgcccgactctttccgcgagggaatctaagcaccttatgggatatattttgaaggggtcttcttgcgagatccattaccagtgtatgcattgcctggctggggtttcttttcgaatgttctgcaccgcacaattgcttctcaccgggaatatacctggcgttcggtagagtagctgttgatttcaaaattcgcaagtctgtacatattgttcttcgcatattgcaagcattggaaattcctttcgggtatgtaccttcgcattatctgatcccccactgttggtttccccggtacagatcgcgaaacacgagaacgcgctagcacgtggtgatgcaaggcacttccctgctagtattcccactagtccactagtctagaggtatgtggggttgccagtgcatccagagctcaaacctggcaggtggagatatctcaatggcacttgcaagggattactcgccacattgcattcgacccttgggaacagtgtcaataaatataccgtacaatatagacgactgtggtccttgtactccgtactccgtagatattataccaatctgacttgactccgtaaaatggtcaaacaaagacccctaacgttagctgcctaagcatgacgcagctaagatgatcggcactttccttttcggtccactctaagaaacttcctatggggtaaagggtaaacgatccttcattcctgagacttgacaggagcagccacatcttgctcgctttgtttgaaatgctatggactacctaggcacatcatgtatcaagtcgagattaacgcttgagaataacccctggaacatgttaacaggtacagcagatggaacgcgtgtgtggagagttgagcaaacccttacgccatgaaaaataaactaaaaattggcaaatgagatgctaacgccaggatctagaccaataaccaaaccaattagatccgtaaatccggattgttttgctagtcgcgtcgcgtgtttttgtgcccaagtggattgtctggcttatctgatcgtgatcaatagtggggaccgaaaattggagacgcgtgggagttgttgatgtcttatatgtaggtttatgaagctacataagtagtggctggatactgttatatggattggatattcactattatgtatgtatcagattcgagaaggagtgatatacagatgtagataagatcggaatctacaaacctacaaacaaagtactacaaaatctatattcacatgcacaagaatggagctggaatggagctcggccaagctcggccaaggactatcctttcggatgtcgctgggatccaagtggcatgagaaagaaatcgcccaaataggaaagaagggctgggaaaaacacgcgccgtgcattacctaagcggtgcgcgcggtcacgtgcgacgtgacttagcacgtcgcgctaaagagaaatcggcagtacttaatcgagtttctcttccctcgtccaactccaaagttccaatcccactatcaaggcttctgtctcattcttacctgctgcctttgttctcaataattgttcttgtgatatcacatttctcacataattgttccaatggccgctcaagtcactccctcgaaacaggtacgtgatgtcacgtctcttgcctctcgcctctcgcgtccgacgcgtcgtgaagttcgtttgagctaacatttactttttcttaggctgcttcctccctcgagaacctcaagatgagcgattcacctattaagaagctcgacttccagtcgactggcaaagagaacgcgcccgcgtctctgaagcccgtcgatgcccccattgagaagcccaccgagaaggctctcgcgtccaagcctctgaccatcaaggagatggaagcgacagagcccctcctccaggagaacccccaccgtttcgtcatgttccctatcaagtaccacgaggtaagtcacgtcgtcgacgcgtcccacgcgtaaagtggatatcgacaaagatgttctgccactgtgaacattgaagctaaccgtatccctcatttcacagatctggcaaatgtacaagaaggccgaggcttctttctggaccgccgaggagatcgatctttccaaggatcttcacgactggcacaaccgcttgaacgacgatgagcgttacttcgtctcccacgtcctcgccttcttcgccgcctccgacggtattgtcaacgagaaccttgttgagcgcttcagtggagaggttcagatccccgaggcccgttgcttctacggcttccagatcatgatggagaacatccactctgaaacctactctctgctcatcgatacctacatcaaggagcccaagcagcgtacctacctcttcgatgctattgacactagtgagtgattctcccattgacttgatatttgtccaattgtctaacctggcacttagttccctgcattgctaagaaggccaactgggccctccgctggatcaacgaccgtgagtcaaccttcgcttcgcgtctggttgccttcgccgctgtggagggtatcttcttctccggctcattcgcctccatcttctggctgaagaagcgtggcctaatgcctggtctcactttctccaacgagttgatctcccgtgatgagggtctccacactgactttgcttgtctgctgttctcccacatgaaccaccgccccgaccccaaggtggttgaggatatcattgtcgaggctgtcggaatcgagcaggagttcctcactgacgctcttccctgcggcctgcttggcatgaacgccaagctgatgtgcgagtacattgagttcgtcgctgaccgcctgctggtggccctcggcaacaagaagtactacaacgctaccaaccccttcgacttcatggagtccatctccttggccggcaagaccaacttcttcgaaaagcgtgtcggtgactaccagaaggctggtgtcatggccagcaccaagcaggaactcaacgctgagggcgagaaggtctcaaacgacggtggtctcaacttcgatgaggacttctagattaagtccttctcccttccctcttgtgttgttttataccctctcccctttcacgtgatattatgccgttttgtctcttattgattgatgtaattcctgtttgcaggctcgcatgggaatggtgtttcttgtttttatttttcctggtctatcctgggctctggtgcccatggatgaatggtggattctctgtatctagatcttcgaatgactccaatgtgtcttgatatatgtttgtttgtatatgtaacataacatattaatcctcctaaatatacgttatcaattggctagtcccatcccatccctacttcacactctattgaaactctatgtatctcaagacctcctgtggattttgccctaactcgaagttggtatgtcattcccgataccgaaagacctcaatcccatatctatgaatgcatcataaaaagtaataagcgaaaagaagcataacaaacaaagcaatgaatctcattcaaaagaaaccagttgatttaccgcttccccttcccgcccttcttcttccccttcgcactctgtccctgcgcctgcggctgcgccttactggcaaccggcggcgtcgcaacctcctcagcaggagcatcgaccatatccacatccgcgccggcagcaggcaccgcagccgataaccccaagcccgctacatcagcaccggcagccagcttgcccagacttgtaatcagacggccgacttcctgcgccttgtttgtgcggtagtgcaggcagattccggtggttgggttgaatgttttcagcgtgagggttgcgattgaggtttgtgcgggtgtggtggtggaggaagcatcggtggctttggcgttttttcggacttgggatttgtgggcgcggattacgtttcctcgtcggtttgtggggaagttgtattttgttactatccgggtctgggaggtttgcttgttagttaaatttggatttggattggggtttgcggttggtgttcattgttgcccgctgtgggggaacgcggtgtggaagattggatggtgggttgggatagagggttctggtgcttactgtctctgggtacgcttgtaataattgcgcggactgttccaggtaggcctgggaggtggataggtagggcattttggagtagtggtgagcgtccgtagagctcgtggttttggagttgaggtgtggtgggatgcgcagattggtgggtgtttctcttggtgtcgcgggtttactcagaatgagatgtcgcggatcaaaaggaaatgtccgctgagattcaagactcgagagagaaactggttatgaaagttggtggatggagagagcgtggaggtgttatcgttgtgctggcggctttttccatgtcttggcatcaatacgttcactccgcaatttataggaaccactctaaccaactagttaaccaattctcttttattatcctatacgatgtgcattacttgagatctaattaaatacgattattggacctaacgagagccatcaaccacatctacttcattaggctcagccaatttaccgaagatcgcagcttgtatctcataaaccattctgtactaagtagcttaccctcgaatgtaagcgtccaagtgaggtgactaaccgcgacaaaccagagatcatgcaatttctgccaagccttacatagtggaatatgcgaaacatccgtcctgttgtgctagagaatgcctttctcctctattattacatcccctcaacaaggcacggagcaaatcagcttgatacctttcactctacacgatagataatcgactcatgtcacaaaatgcctacgttgagcctgtgttctttgtaggctatagtaagctgcatcgctcgcagcaaggccttaacggcgcactagagtggccgttgttgagagacctcgtgggcaatgtgcaaggataccaagtgctcgaccttggatgtgattttgagtggttttctcggtgggcacaagaaaacggagcttaaaaagtccacgggatcgatatctctcggaacatgcttgagcgggcaaagagtttgactgtacatcccgcagtcacatacagtatcggcgaccttgataagatcgagttggaaaaggacttatatgacttggtatacaggtccctggctttccactatctccagaatctgaaggagctctttagacaggtctacgatggattgaaagccggcgggcatttcgtcttctcggttgaacatcccatcttcacagcccctattattgcaccggcttggactgaaagtgctggtcgaacagcggcatgggctgcagactagtacgctgaagaagggcttcgcaagagggactggcttgggatggaagtcttcaaacaacatcgcacggtggacacacatatatcattacttctgggtactgggttcattttgacagcagtcaaaaagtggatgccgactagcgagtatattaaagaccatcctgagtggaaaagggagcgacaccatccacttttccttgtggttggtgcacgaaagcctaagggagcccaaacttgattcgattccggaccgacggtcaatgtctttatagggcttggttcgcaggctgggaatgcgtgagagaatgcgaggaactcccatgcttggaaaactatacaatatgccatttacacgtctcatcttccattgcatctggtactgtacataccctgctatcaaggcctaaaaactatacacattaaacacatatcgacatcacaaatacgtaaaacaaaagatcaacacacccatcctccaatcctccaatagaatgccaaacaaaacgccaaaacctaccatacatcccagaaaatcatagatcgtacattcgtagatcgtagatcatacatgcatcacatacatcgaaaaacaaagaaaaagaagaaaaagaaaagactcaagaaatgggccgatggcactccgaacaaatcagcttctgtttcccatccctccccttaacactgcggaaacttgtcccacgacaattttcacatttgagcacgtcttcctctccatcacccatcgaagaggaatagttactactcaagatactacctcctgaaatactcagcctgcgctcatgcgacgggattcgattcggactgaggaagtcactcggtttccgggactgcatggccagtgcatcgtgcgtgatcttgttccagtacgcgtagctgcggtcaccctgtatccagagtgggttgtcttgtgaatcagtcgcggctaggtctgccggggcgaatttcaagtggggttggggtggtggttgcggcttggagtttgaggcatttgcatggctgacatcttcgcttgtgcgattgctgtcggggtgtggtcggcctggtgatgggggtggagatgtagtgaagatggacaatgattcgttccggctgaggcttgaaggccggggcgatgctagtctggaaagggatgggcggttctggggggatggggtacgggttcggaagtcggtgcgggagccatctgtgctggagcggccgtggcggacgacggagttgcgccatgagacaatgcgctcggatggagttttgtgggaggattcctttccgattgaggaggcgatgctacggcgtgccgaattggagcgtcttaggatccgtcgtgagatggtggagttggcgttccaattctcgaagcgtcgtttttgatacgcgcagtcttgccggagaactttgatcttgccggagtagtcggcaaccacgattatctctccgtctggatgcttggatcgtgcgaggtacgagggtgaggcgtgggccattttgctgatgatggataggcgaggtgctgattcagagtgtttatgggatttctttgaaaagtctgttgactccggaccaataagggctaccgggggcggattgcagatgtcgtagattgggtcttctgatagcgccaggacctctttcgtttggttgggtgccattattgcagctgttaccatggcagactgtgtctcaaatatctccacagcctgcttttcggaatcctgttgcacaggcccaactggccacacgtatgccctgcgatcctcactcccacatatgatatacttgccatcattggtgaatgaagctctaatttggctgcaggtgttctcgttgccgcggaatttagcctgcaacgatcgatcattgaagtcgtacagcctgatgcgggagtcgttgctagtaaccagtaacttgatatcaccatcgtcatcatccttggggttgtccttgggaaccattatcgtatcgactccagtgattttactacctttggcgttgcgtccacgggccgatcgtacatgaatctgggctgatacctttaggccctcagtgtcatagatgttaagcatgccattcaaacatccggcaatggagtatcggccgtctggagtgaatgccacagcagtaatcatatcaggcacagtagtcacaaaagccacgctcttatcgggtatactccagagtcgcagtttcgtatcgagagatccagcgaggaaaaagcggtcgtcacgcgggtggaattggatcgaagtcacaaagtcactgtgctggaaacagcaaagacattccggtcgagagatatgccacagtcgcactgttttgtccattgacgaggagagaatgaagttattctagcgcacacgtcagcatggacgcttcccatcgtgttgaatgttttgagcatgcatactttactccagctcaggtctaggatacttcccgtgtgtccctcatacacctgggcgggctccggctggaacacaggtgccttcaggccggaatcgtcttgtgcatctacgggtgttgccttttcgtgctcattggcatcctcgcgctcctccggtgtagcgataacagtccatactcggaccttccggtcctggccagcagccgcgagatatttaccatctttagagaatacgagtgcccagacggcccttccgatgttgtcgccattctgtagcaaggccgaggacgtagatatccgtctatctgcgggtttgggcgatgggccgctgccctccagttcctgtgctagaaacacgcggtcgaacgtcttctcttttttgtactgggctcgcaccttcagatatttcgacggagcagggtgtcgaggtatgaatccaattggatgatgtgaggtgtccatggacatgcggggcgtttcagattccgaggtctcatcttctacctccaacaactgatcttttttcttgcctccgatgattcggctgaggaaggaaacaccttttctgtagttgagaagagcaaaccacgggtcagtcgctggtaatatcacgtatattgttgcggcgagaatcctggggggaggcgaaaagagactcccggcacacaagtgtcggcgacacaggccgtcgggcgtaacttgtgtttccaaggcatggcaaagtctaaaaactcacttcttctctctaggatgtttcgaggtaggcaatgcatctcctcgtatcgggcttcggtctccctggccgtactcggagcccacagcctctgcttcgtatgacgcttttcccagtaacttcaggggaatggacttttgggtattggtgcgttggataatgtgctataacgagagcacggccctcctgtcagcttggctgcatcttcgtatccgcatctccgatgcgggttgcacaaagcaaacaagcacatgatcggtccggaagtattggccaatttggtgtggcaagtctcctgtgagagcttacctgcgatagcggatctatagcacttgactcggtcctctcgtgcggggaattcaaggtcgaatgagagccaccaatgactgcgcgtttggtatttcgaacatcgtgcagactatgagtcgagcccgaggggacatccgatgtggccgaggctggcagttctgtcagcgtctttccataagatttttctgttctttttcgcgcattggagttctccagacagggaccgaatttagagtttggccaagtctggagattcaagattcaactctcgagattcaagtctcaatattcaacttgcaaaatcacacttaccgggaaatgtcgagtttccggggctcaaatcggctatcgcgggggtcgtcgcgactcggagttgtagattgttgcttccctccgccatgtgttcagtcgcatgaggggtatcaggtaatatacaaatgcagatgtatgttcacagagacttgcgattaacaaaagaaagaaagaaaaggaagtaaagcggcaacgaccggatagcgctggatgacatcaaattcggggagatggggtggagacttggaccctccagggtttgcttaattgcttactgagaacgttaaatggagaagatgacagttaagagtatggaatagagaatagagaatagtaattatattaaatgcgcgattgaagctttctcacacggtcctttgcaatatcacacatacccttcaaagtcagtacatacatccagagtaagtaactcgataagaggacattacctgaatggtctcttcaatctctttctccgcattagcccggtcaatgcgctcgcgcatctcgaccataatcacgtcgcgattgcgcccattgacgaacgtgctatacatctcaagtcaacatgtatagatcactgcgcaagaaacatggacctacacaaaccgcaaccctgggaatttctcctcgtattccgcattgagtgctcgtaattgctccgcttgttcctcggcgccttcattcaattgggcctgttcctttttgctcagctcgctcagatgttccggattggctggggctcggccaagacgtggatgcgaccccaaaatgccaaacagtacgtctcggtcggtaggtgaatttgcggctgagagtgccgacatgcgacctcctaccgcatcgatgagggtggtgtatgaagagaaggtctggttggccagcacgggaatcatcagtcggtggagctctggagagggttcgaagagggtatcgagcacccgaagctgggcctcttggggtagggaggggatcgtcgacagcggggggagttcggccatggtggtttctatgaggatatgtatgaatatgaagaagggaatgtattgcgattaagtataaaagagatcgtacccgctttcggaggacgccgaggcggagaacagcgggaatagtcgatgtatgtatcctatagatgtgtacatgtgagctatggagactggaactgtttgtttaaccgtttgactatttatatcttagtgtgtttcatatgttgagtttaacattggacacctcgcattccttgaacacccaatcattccaacaaatccaccgtatacatctacctaatcaacaactgcactctattgaaacctgatacattattaaattacgccaatcaaaggtggagcccaattgagaacatgttccccctgagaccagttcgcctaaaccaactttgtttttatgaaacagccgaatctgcacctccggccttgattgggcacatcgcgatctaaagatccgatcccaaatcaactcttagtgtctttacccgctttctggggccacttttccctcctattctctcctcttcgctttacctttttgcgcctcctctggcccttctccatgcggctcacgctatgtctttgaatgggctcgatagtgcccccgtcgtcgaagcctaccaaagtgccctggctgacgcgggcgggtggtgagtaccccctttcggtgtttcaacgcactgtgcgacagatccattaacttcacttcactgacacccctatgtttcaggtttctattacactatgttgcaagagatgaggttgccctccacgaacgaggcgtcggcggggtgcccgaaatccggaatgccattgacggctacgaggaatgctcgccgctctatggcttcctccaataccggcgcagaaaagtgattatccgatacatgccggagggattatctcggcttatactaggtatgcccttcgctgcctttccataggaattgatctaatctgtcctagctcgaagcaatgtccagttccaattcgtgatcgacaagttcacccccaacgacaccatacttcctctgtccaaagcctccgatctcaccgaaagcgccctgtcctccgcttgtctcctccataccgcgtcgacctcaattacctcttcctcaagctcgcttcgtcgccgccgactgatggaaatcacggaggatgccgaggagaacggcacaaaggatgaagctccgaacccaatcacacatctccagtcggaggcccgacgcagaccaaggagtgtcaagtcggaagctaccttggtgccgtcgccaattgaacatcccgtggaaccggaactacccccgatatcaccagaaagtgaaaaagcaccagtcgatctcataccacccccatcccgatcgagctcccgagccacactctctcgagggagtcccgtcgaaccacaatcagcgacaatgtcccctaggtccataaaatcagatcgctcccgctccagttccaggtaccgaactatcttggatgaattcccccgtccttcggaagaggcccggttgtccagccaatccagccgtccctcactccgagatttggaacgagccgcgggatatacgccaaaggttaagctgggaccccgaccgtccgtggatagcagtggtagaccccgcacagcaggcagttctcgaaatttagaccaacgtcctgttgcatccctcccgacaaatatgcgctcatcttccgtgcgaaagcaaaacaatgacgcgccgcgccctcgatctcaggggagcactttcgcaatcaaacccactagtcgtgttccaccagtcccccctttgctggttccacccccctctatccctatttcgagacctcagctttcccctggcgccaaatccctcggagctctgtcgacctcctcgggattgacccctgagaaagaacgtttgatgaaggctttgcagcaaagaaggaagaatatggccaagcgtgcggaggaaacgaaaaagaagcaggcctctgaggaagggctcaaaccagtgaagcatatcgccaaggatctggatgccgataaagagaatcttattcagattcactatcccgattctgaaatgatgctgtctgagcccgagacaatccaacaggatcaacaggagttaccttcagccaattcacccgtgcctcctgactccgcccctgagcctgcctccgagtctattcttaaacccgcgttcgagcccgttcatgattccactcttgaacttgccaccgaacctgttcctgagagcgttattggatccgctcctgatcctgtcgtcgagggagttgctgaattcagtcccgacctcgctcctaattcggttggatcaaatttcgaagctgtccgtgaattagtcgccgacccaattgttgagtctgctgtgacgcctgagccagagcagctttctgggcctcttgaggctgaattaaacccgatcggtgatatttcccctgcaagcgctgaggatgggccatccttacctacggcctcaagtaccgacagatttatctcagccgatcgtgctgccacaccttcagagacagttaaggaggaaacaatacagacaacccctgaggatgaaacacgcaccgagcacgaggactccgcaatctctggtctcgccccacctacctttaatcccgacgtcccacttccttcggatgccccacgagattcaggggacgtctccgaaacacatttcgaaatttctccagctgcatatgtaccaactgacgagccttctgacgtgcctatcttagcagaggtccctcaggcggttcccctcccctccgtcccctctattacccctctagagagcgttggcacggaaacaccagtcgcccccgtttttgtctcaatcgaggtggacgaaccgacccctgatcgcctagttgccgagatagccgagcctcttaccctggatcagaggcgtagggtccgcctggagcctattcaagtgcctactctagatttctcggacgacgacaacctcctttccgacgattcgtttatggaggaattgacatccgctactgtccagcaagctagaccggtatctgtgaaatctcccaacggcgtcgatcacgcctggaaaaatttacgcgccgtctctagcccgttctctatgggggcatcgtcgggtatgcaggctctagcagtgggccggtccgtttctagctcccactctgaaagtcgccctactacgccggttctcatggccaagaagatcaacgtctcctctggaatttccagtcgtatcaaagctcttgagaagttttcgagccgcgaaggcactcccttgggtgccagtccggctgtaagtgcgccgtcggcctcgtcgtctttcgagaaccttcggaaacgcgcatctatctcattgcccggtgggaaccacgaattcactccaccaagcacaatgcattctgctcatgtccctgagagcttttcccgtgcgccgagcttaagtcggcacaaccgtcaggtgtctgtggatactgcgcgacctgctagctctatttccgtgacggcccgtatcgtgcgtgatgcagatatctctcccgtgcctgctggacctgagccctcggagaccgatgttgtcaacccccaggctagtcctgtgactgtggagcctgagatagctgaggcaccactccctgagatctcgcctatcgagcctgccagccgtccccaggaccgaagcttgtcaatctcatctactacatctaatcgccaagcgacatctcgccctgaaagccgtcccggaagccgcccctctcccccctcgcgctctaggactgacgacagcgtccaatcagtctcttcgacgcccgaagataagaaatcatctcgcacttcgcgactcatacgccgcatgtcgtcgatcacatccaactctcgccggagcattatcggagcgctcagctcgccagtcaaggaagaggagtatgttcccaccctcacaaatgggtcgagtaaggcttcagagtctactagctcgcgtacctcagatgctattgaaattggcgaggtgaacgtccagttcccagaaactcttctatggaagcgtcgggtcatgcgcatcgatgaagagggatacgttgttctgacacctggcaccaatgatgccaccacccggaacatgactaaacgctaccatctcaccgagttccgcactccttgccttcctgatgaagatatgcaggaactaccaaacagcatcttgcttgatttcttagatggaaatacgcttcagtgtgcttgtgaatccagacagggacaggcttctgctcttcagagtaagtatcccttgcattttcttcgaagttggagaataaatagctaatcatctacagctctcatcgaggcccatagcgcccaccagcaatgatcctcacatttctcaaatgacaggactccttataccgatactcctgtctcccatttccattctcttctgggcgtcgcccacccttcctttggctttaccaactacacgcatctgctaaacctccttcgacatctatttcttatctcttctacaaccccctctgtacctctatagcttttctctgtcttatctctctcaatctggtgtgtatgtgttgtgatatatgtggcgtgttcttggtataccccgagtcaaaagagcttcctttttcctttcccacttctcgcaatgccaatctactgttctttgccatgtacagacagacagacagacagtatttctttgccgctccttttgcttgcctttcttaattgactttgctcttgcatacacactccatgccttcgcatagagtgttggtgttctattcaatgcactgtgttctcttcttctcttggtttacttctagaagctttatattctaatctgtttttgattgctattttcgtgcatgctaattttggaatgtatctaaaaggtttatttgattctcttcggttctgcgcgcgctattcaactaatgttcaaagcttgtgctggctggtagtgatacggtggtgtggttggtttgggagaagacaagtagacttagggagaatatctctcgtgctattaccagctatgtggttctacctacttttgggggggtatcaagtggaagcaatccgaaagaatcgtcagcgaaacatcgaaccgctagggctgtgcacatctagcaaattcatgccgcaacacccttctaacacccaacgcttatatatctccattgctaagctaagaatatagccacgggatatctgtagggaaataaaatcgttagacggtgtatcttgacagccgcgaataagaagtaattcaataacatactagagaggagggtatataattgtggcgctgtgtttttctcatccactgttcctttcaaaatccagcgatatgagattttgattgttcaacttttttttggatttctgataaacgtcatggctcataacgatcgttaatttcatgaagcgatcaggtgtaaccgttcgcaaggtcctcgagctcctgatcttcatcatcctcttcatcttcgtcattctgctcttctaatccctcggtctctggaatggatgtctcttcatccaggggatgttgaccgttttcagtcgtgccattctctttatttatagaatagaactccgggaatgcagtgcgcatttgcagcacatgcgcatcaacgacgtattgcatgaggttgttgacggggaaggaagtatgcatgcgtttctccgactccatcagctcaaccttcatctgcatctcccactcgtgctctccggcatggtccccaataatcttcttccgctcgtttttgtcggtggtcgaaaccaccttctcgcatccgggcatgcggcatgtccaggtatcagatatctcgtcgatgaattcttcaatttcatgtggcgtatctggagtgggattccgctctggagtcagagtttggcgtgatggtgacgaagatacggggggagtctggagtttatcttttttgatattgtccttgaacaggctcttcataagagaggagccggcgccggtcgaggaggctgcaaagaacgagcgagtccgaggctttgtggctgagaatggatctctgattaattcatagccacgcgttttgctcggtgtttcaatttcgtcgatgtcgatttcatcggtatcctcttcgtcttcctcgttggactcgactgtttgctggtttgcgggggcattgcgatttcgcttgccggtcgctttattggagactgtgtggactcttggacgcagcacagacttctgggtccggccgccttgttcatcgtcgctggattcttcctgcgaatccagaggggttaggagtgcagttggcagaggggcggatgtcgtggatgcatgtgtgagttccctatggataacatagcgagaccatctaaagtcctcttcatccatcatttcgagcacggcgcttgccctgaaggcaatgattttctgggcgtcttcgttgctgagagagaatcgttctgcaaagcgttctcccaggaggtcaatatgcaggcgacgctttgccaagtgaccttcttctctaaggtccttgagcagctggtagatggcatcggcttgtgattttgagattgctgcaggctgatgccgtggagttgtcacttctggttcatctgcgggctccgtttcgctttcctcggagggctcaagctcttctaacagcctattatactcatcctaagcttattatcagtatgcacagaggctattgtaaggagacttctttccttacattaaatcggcgacgcagatggacgaagacacttgtcttcttccattccacatctgaatcaccttggatcatgcaacgaagcaagaaggaagcatgtgtcccaaagacctcagctgactgttctcgggtctcacatgagccatatgtatggtaggtatactaaggagggataaatattaggcttcggtttgtatagcgcatagcttagaatcgaaagactcacttgttcgcagagactcctaaaagatggattgatctgtctctttccttgctggtgcttatcaaccaagaaatacagcaagtcaatagcctggaccatgcgattgtatgtgggtgtgaaacccttggcgggcgaaatgatgtcgtaccagcctgccttaccagcaacccaaagctcaatgctcttgtcttcagtttggccgtaggcatagtgtgttacttcgtcaataataatgcgcttaggagggttatccgggttgagcactggtgggcgagtggctggtcagcaagctgcttgataaacgcgcattgatacaacgatacacacctaagtgttcctggtcctcatgaagcggctctaagcagccgatcacctgcactggattttgttcggtggcatccagtagatttgcatatagcatctttccaggctttaggaccttcacatcggtcaggctgaactcccaccaatcgttctcgtcagtaacagagggattggtgggagctaggacggtttcttcgcgggacgtcatggtggaatgggcatggtgggtatcgacaataaggtatggaaaagtgttgatatatacgtaaggtcaattaactgagaataagagaataagaagaaggcgacttggaatggaaccttgtagttgtcaacagtcaaagtcgtcgaccgccagtaaattacggatacaataagttactcataattaattacatgggtgttctgcctggtttatcgggcatttataaatgaatccatcacgtgcacatggcataattacataacttagaattaaggttacagcggtccacggatccacggctctgatcaaaattagactccgatcggatctcagctttgaaaaggcatacatatgcatgtacatatctaggcacgccattcctagagagatgctctcggtcaatacaatactggagccgctgtgaagtttgctaaggtatggtaggagccggatccaccatgggtctaggtttgtgaccgattacgcaggatgggggttataagtggaagaatatttgatgatcaaggaataacgagatgtgtattaagtttcgatgctagacgcggggtgtggggaaagcattttttgaacgccgtctcaattaacgctttcctggaaccacaaaaaaaaattggaagactgaagccactcatttatcttctttcgagggcatccgtaactccatgagcagtgtattatcctctaggctaagcaccacattgtcagtctgtcaaaagagtattttgcttttgcatcaacgaagatcgtagactttacactgtcatgattgcatctctaagagctgttaagcagagagccatgtctggtgttaggggtaggcgaaccttgatagaaacttggcagttgcactccgatagacgaggaagacgttggctggtacagctactaggtcaaggcctttgtatttattcgctatataaaatcagaaaaatccatgactattaagacaaagtaccaatgtattccaaaggtagtcagtacggagtagtgtagaatagtatgtcaaggggtgcggtaacaggacattttgaactactcaatgggaatgtagatatcatcttggctttccctttatgcctgttattttctaccataagagaaaatagactatgaaaaatggaatctactaggacatcaaagatcaaaaaagaggcacaatgccttcaaattgcacttttaagaaacattaaaataatgccgaggcttttcatctataagtgctgtaatatctgtagatatctccaacaatgatctagaaacctgtatatcaattatatcagaatcgtagggcaatcgccttgtcagtcccaaagaactgccgtaaaggcggcagccaaatctctaccaaaataactttttcccccattttggattgactcccacctttccagatgccatttcctccaggttttcggctttttcgcaaaacaatgtctggcgagaagatccttgaaggcgtattcggtgagcttgaatcccactaaagcaagacttcgatctaacatctccgctagccgtccacaagccgcaaggcgtcacctccgccgacgtgatccgtactttgcagaaacacttcaacccctccaagacattcaaaccatggttagaagaagaacgcgcccgccgcgaccgtgagagccagttccagcgcaaacgccgtcgccaccagcgcctcgacgtcaagatcggccacggcggcaccttagacccgctcgcgacaggcgtgctcatcaccggaatcggtaagggcacaaagtccctccaggatttcctggcctgcaccaagagctatgaaaccattgtgacctttggcgcggagacggatacctacgatcgcctcggaaaaatcgtgcgccgcgcgccctacgaacatatcacacgcgaagcagtcgagaaagcactggaacagttccgtggggaaatcatgcagaaaccgcccattttctccgctttgcgagtgaatggaaagaagctgtacgagtatgcgcgcgagggcaagatgccgccgattgagattaagcaccggcccgttgaggtcttgaatatggagattgtggagtggtacgagcccggcacacacgagtacaaatggcccgaggtggagatgactggtgatgagaaggctgtcgctgagaagcttcttgatcaggaagcatcggtgcctgcgccgccggccgaaggtgacgctacaagccaagcgcccgaagcttcttctaccaagcgcaagtcgccacccccggcggatgaagtgaaggatgatggtgcggaggctgctaagaagcagaaggtgtccgagagcgaagcggcacctattgcacctgagcctactgcccccgaacctgcaactacagaggcccctgttgtgcctgcagaggagcccaagccccagcctccggcggtgaagattaagatgactgtcacgtcgggcttctacgttcgctcgctggcacatgatctaggcaaagctgttggtagctgtgctctgatgagcgagcttgtgcgcagccgtcaaggtgactacgaactctcccctgataaggttctagagtacaaggaccttgatgccggcgaagaggtctggggaccgaaggtggagaagttcttgacagagtgggaggagaagagagccactaaggctaaagctgaagcagcccaataggctatagtctaaaatgatatagcatttgtatatagacttcctatctgtaatatcatagagaaaataaatcaaaactgccattttttggttatccagacccaagcgagaaaaaataattacatgatgcacgatacaaatgcaatgtcacaacataacccatcacgtcaaaacgattagttgcgtcccttggcttggactctcttgctcttgccgggtcgctttgcgccaaccttcatcttcttagcggagaagttgctcagatcaccactggacgcggcatcaccgctcttagcatggcgcttcttgcctccgaatccgaacttggcgtccttcttctggcgcttcgagccaccggggccatcaccacggctacgcttcttgtcgggctgggtagcttcttcaatggcaacgtcgaacatatcattggcgtcgtcggtaggggcggagccatcagccttgcgctctgtgtgaaaaatcaggttagcgactgcgaaactcatagaaaaataccatgaatgaaacaaagtgagaacatactcttcttcaaggtgttgatcttctccaacatttcgcgcttctccttgtgtctctgctgcaacttggagttctggacctgcttgccgaacttcttaagatcacgctggcggcgcgcctcagcagaagccttcttgccagcagcctcctcgtaaagcctcttcttgatcaagcccatgtgctcgtcattcttcaccatttctgcgaagtaatcgcccggccgcgtgaagggaatgccatccttcttcagcagggcacgtgcttgggtagcagcaatctggcagaccttgtagaacgccaattcacggttcaggtcgtcatttgcgtcttcaacctcgatcggctctttcgagactaaagagttgtgctctgagaatggggtgttgggaccgatgaacgagatgcgcttgagggcggagaggatagcggcagagttgttgatcgtcaaacgttggtggggaacgacatcttcacgctcatcttcctcgaggtcggagagtgggatgtcttcttcctcttcctcgtcatcttccatctcctcgtcctggtcgacctcttcctcttcctcttcctcttcttcctcggcgccagagctggcggccttctcttcctccttctcttcctccttctcttcctccaagatcttgtcctcgggggcggcagtagccttcttggccttctttttttcggcggccttgatcaatttcttctgcttctcggcctcgaaatcacggcccttgtgggcatcgagagcctggagtaacttgctgcgcttgaccattcttgctttgtgttaaaaatacaaagagaaaattgtattttgtgtgatgtgaaaggaattgaaaaaaagaaagcgacttggtatcaaacccgcatcagagaatccacgggatttttttgaaatcgcgccagtcctgatcaagctagcgttaccgataagaccaagctagtccgtaagtggaaatatttcggaaatacatatgacccgatcccttatcgagcccaccgccctcccctccctctctacatgcctcacagtctgtacagcgaatgccatagtctcacaatggccgacgaatccaagtccccttctccagacaagctagagagctccctaccagagggtaagtctcttctatcccaaccggtacataccatcttcaagctccaaactccacctgtcgctcttactaaatgccatcagaactccgatgctcaaggccagctcaccgcagctgtggacgatctgctcaatgagctacaaagcaaattcgacaatgtctctacggagatgttcgggaaacgtgagttcctgcctcaatcgtcttccaccaccgccaatacattcatacctgcgaatgtgtactaacctatgtacatgcgcagtggatgacatgaccaagcgcctcgacgagctagaggcgtctctggctgctgcatcttcggggactggcgcgccgagtccgacaaaataaatatgaacgccttttacccatactccgcgcacagcgtttttggcgagagtgcaataagcgctacactttttggctgtccagctctgctgaacccctgtaccaattgcgcaacacatacttaattatggcatacatggtgttttctaaggctttgcatggaaccgccgtgtagcatgagcacaccggcctgtgtctggttctgatacttatgcttttacgatttcatagataccctacaatcaaacgaggatactcgtacagaagagccaaaccatgtttcgtcatttacttgcgtggatctagttcatatataacatggacatttttgaaagggtaaacccgaagttggtactcaattcatacaatatacagcatcaagcaaatattctcgtatacaattcaatccatttccattgaacccatggttcatagcatgcccggtcctcaatctagaatcaccgtgactatagccttaagccaaaaatccaagaggaaaaaaaacaatcatctagaagcaatgacaagcacttaaagctcatcgtgcttctccgcgccaacaaagctacggagaatgttgctgcgggagagaatgtcatccagcttctcgggggccgagccacccttagccaggaccttctggaggcgggccagctccttgacagcatattcctcgttcttgctcagcttctccgcggccttgacatagtactcggcgtacttgtcggacagaccctcggcggccttcttaacatcagccaccagattgtcgaacttctgcgccgcgacgctctcgctaacaatcttgtccagaacggcgatggtgcctgccaggctgtcaagaccgccaccgacggtacggtgagtaccagccttctcgttgatgaacttgacaaaggcctcctcggagcgtgcgccggagtaggcctcgggttcggtggagcccttggggaagaacttgatggtagggaatccggtaataccctgttccttgctcaaagcacgggaattctcggcttcggcgtcgaccttggcgataacaacgtcggactcgagggcgaagtcgttggcgagggtttcccagacaggagcgagggtcttgcagtctgaacaaaagacgtattagcaaaacaaaccacaagactagaggtacaattagggagtcaactcacgtccacaccacggcgcggtgaaagcgaccagcacatccttatcgccaccaacagcggtcttgaaagaagcatcgttcagcatctcgaccttgctagcctccttctgtgcgctacgaggcttgatgccagtcttctcggtgatgaaggcagacaggctctcgagatcacgaccacccttgtattcctcgggcttgtcactctttccatcgaaccacttgacagtagggaagccctggataccaaagcgcttgcccagcgaacggttctcgtcagcatcgaccttggcgatggtgaccttgtcttcggcgaaggcgaaggtctgcgcgagctcctcgtaaatcggggcaagggttttgcagtgaccgcaccagggagcgaagaattcgaccagtgcgggcttgccagccaggacaacttcgtcgaagttggtggggattaggtctttcactgcggagttgcttgcagtggcgacgccgctgagggctgagagggctccgaggagcaggaagcttaagcgtgccattgtgtatatggattttgatgtgagtatactttcggagaaagtatgagttcacaaagaaatgtggatggcggagtttaagctcgggggagacgatgacaaacaaagccgaagaggccacttggtgactccacaccgcagatcacgtccatctactgccaaggttgacatctacgacgtccataatataaaatagagctacttcccctatgctatatttgtgattattctgctcttgagtaatccaagagtttcttcttcgttttcttgatttgtttggtctctgttgctacctagatagttagtaatacactggagaattgctggtatcgtatttccttgggcaagatcggagctgttggcataaactgcaattgcaagctgcgcttgttaaccaagaatccccgcggtggttgatgggtgtcgttggcgaggtttgtccatatcatcgtctctctgccagccatttgtttgcgtcttcccagagctctgcttctttgaactccttgcccgtactctgtgtgcctacgtaaacctatcttgaaaattagcgtctggtcaacattcaacatcaggcaatactaaccgcatcccacagcttgaatgccaaatccaagtttccaataaagctctcgctgtgttggaaccattccttgccctttgccttgacatccgctcgagcctcgggagatgtcggattcgcctgtagaggtaggtcgtcgaggtaagttcgaaccgcaattccaagtccacagtcattatcatcaataaacggaagcctgggagaataggttagaacaggatacagcagagctaggctaaaggaacatacttgatagccatgtcagtccagtcgttgcggtcccgatcagcgtcaccactgagcagcagaccagccagtaccacctcgatcagattcctcagtgcagagcgcaccgcagaaatcaaagagcggtagcaaagaagttgacggcttaaaggtccagaatatccaatgctcttgtgctgaagcttggcaacgcatgcaacacgcgaaaccagcatattgaaggtcttgtcgtcttcggaccctctcatgggaccgccagatacatgtgagaaccagttcttagtgttgagaagacccaagcggatcatctcaatcgcaatgaatataggttcctcgaggttgtccgcaggatcgatggctgatagtgcctgcactagacactggccccacggagtgagcttgtgcttgtcgtcaacgtatccacggagttgtaggaagcgccacataacattagataaaatatcctcctgcaatgaaagtgcctatcgaagctgttagtcatcggtagtgtcaactctataggtaagcttacaggtgtttctttattagcaaatgacttggacgcaaactcagagtcacttaagctctggacagcaaacttaaacgacccgcgaggcgcctgaagcttcttgatactttcggggaatttatccccatggatcttccaggaattgatggtttccttgactgatgggatgcccttgaggttgatcgtccgctctgagttctcatcgaaccatgggcggatccgaatgactttcgtttgatagaatcgatgaagcgagtttgctaaaaggcaaatagactgggtgcggatgggtgtcaaaatctcacccacaagccggcggtaaatctcggtgtcttcggtacccagcggtagcgagatgcgaacttcgccagtcgtgaggaagttgggtacatcagctccaatgatacctttagagagatagaagtatagctcctctgggaggcgctgcccgataagctcatgcatatccgacgaggtattctctggatccatgggtccgactcgaccttccacgtcaatatagacatgatgcttcacaatcatatatgctcgcttatacaagtctgcgtagtgaagctcctgcatacggcgatcttcttcaaattgggcgcacagtgtcaatgcactgcgtccggctgcgttgaacatcggcaacgcatcacgaatggtggggcttttgccggggtaagcagggttctcaaagagtgggagggagcgcaggaagggggatcccagtagtaaacagaagtccaggaattgttcatttgaaagtcgacccagctcctcctggcaggtttgcttcgtgatccagaagaattgcgcgggctcggtgtcgatacgggtgaccagcttgtcaaggtcaaacaagagggcctcggagggggcgaaaacggcatcgactacaggattgctaccacgggcgaggtaggagagctatccataagaattggttagaacttacaacaatccaagcatggcgcataggtagccactcacctgagccacggcgctgtatggcgctacgatgaattccactccgttctgggtcaagattcgttgaaggaacttgaaaagtgtctccgggggcggggtgcctgagggttcggttgtgtcagcgattgtttgggagcttcgctgtacccagtggtaacgatagaggcccggcaggtccatcaccagggaaagggtgaaagaaggatagaaggtggtcataccagcactgctgaaggcatcgactacctggtctgcctgttgctggtcgtaaaggtcccaagcttggtcgaatgagcgcgtcgatgcgggctgggcgcggtgctctttcttgccgaattccaacccattgaagacgaagatagtggcgacaccaaggttcttgaaagtctgcaattccttctcgatattactcctcaaggcgaacgggaatccgcctagtgcgcctagaagcgcttcccgggttgactggttcacgagatgttggttgatgtagtgcgacgcatcaatgccaacaacggcacccttcagtgctgagaggggtagggactgggtacggccaacggcccattcatcgagaggtcggactagtcatggagataaaaggttagctggtgcgattgcgggttgtggagctgtgttattgcatactcggcatggttctggagcttgtctgtcacagggctgaaagcacggcaacgccgggcatcaaagcccgaaggtggaaacaggaggttaaatcaaaggatataagagcagatcaaaagctccgtgatcacaatatgatgaatcggagctgggattgtttgggttttccggaatgggggagggcgagatcacgagggggggaaggcggagttggagttgtccttttgttttttgcctcaaacgcatcacatcaatttgtttttcgcgtgtttcaaccacttctttttggtttcgggtcttttgtgggtgtattcgatttagttatgccatgttcaactcctatctgtgtattcagatcctgattatctgcttcctataggggaatgtacggcttataatgaagtcatgcccgatatgtgtttaaataggaacaaaacagtcacaattcgttatagcgtacaacaaaatcgtctagacaatgtttatcatccttgctgagtgaattcggcgtatatttataagatctatgcccagctcaggtgtataactaagcgggggcaatgacacatccggcggggttccatgtccattcaggtcggatatcgcctaactgactggagccgactattaaacaagaaattggattggttggacgcaatttgattatcgcgatattgaagatacgcgatagtcaatcatatgtgcactaatagtggtttcaaccctatcttcaactatatattcactccaaccttgaaccctaactgctgtcctatttctgtctcacttcagaatggcagacaccacagtcccaatcgagctccccgtcattgacatctccaatccccatgaccccgccgtggggaaggccatgctggacgccgctacaaagtatggctttctatacgtcaacagcaagggaaccgatttcaccgtggaggatgtagatcatgcatttggattggtaagacttgcattacactccaactgttgacatctatatgcataacatctgaccatctctatagtcaaagaagttcttttcgtctccctcacaggagaaggagacatgcaagatccagccaaatgtttgtaataagactaaaggcaaacaacacatccagtctaacaatatctatagaaccgtggctggtctggaatgcatacagaaaccctcgaccccgagcatcagcgggtaggttatgacctccaacccgcatatagtacgaagactgacacaggatatggcaaatagaccggagactttaaagagtatggaacaaccatatctccaagccttgaaatacccccaaccatgaactaaccacacaactagagccatgaacttcggcgacttcaaagacagcaaagcccaacagcttctgccaccgtcactggaaccccacgaagcagagatcaacggcttcgccgaactctgcaacaaaacctgcacccgaattctgactctgcttgctttaggtctagaggtacgtaacgccaccgagtctatacatccatcataaccaccacgcccagtcacataaatatgtaatctataccaaccatcaaccctagatccaagaagacttcttcacaacccgacacgacccaagcacaggagcgacaggcagcatcctacggtacctatactacccatcaatcttctcaccgacaacagcagcctacaagcacgataaggacgtgcgagccggtgcgcactccgattacggcagcataacacttctcttccagcggcccgggcagccagggctagagatcctgactccagaagacagctgggcgcctgtgcccatcgtgcccggcaccgcagccgaggcggaggggtatccgttcccgccgatcttggtgaatatcggcgacttgctgagttattggacggatgggctgctgaagtcgacggtgcaccgtgttgttttcccgcttgctgagcagcggagcccgaatccgcaggatcggtatacgttggtttatttctgtcatcctgttgatgagacggagttggtgcctgttcctagtgggattgttgctgcgcatcgggagcggactgggggtgttcctgctgatgggagggttggatttggaggtggagcggggaatttagttcctggaaagaggcctttgacggcgcatgaacatcttatgtcaagattggaggctacgtatgggttcactaaggatgagtgagggtggggatcacatagcttcaattttggcgctctacgaagcctgaattaccgactacatgtagcttactgggcattgggtagatgggaacagagtcattcgtgagactgggaataaattataaacgccggtgccgttgaggcatagtgcaaacacagaaaagacaggtcctccggacataaatcagaatcatagataggatgtgcaccaaaatgctccagatgaccataacacgacccaagttgtcggcaattatgcccatctactgacataggaaagtcgtgacagcgcaattagttatgagagaaaacataatggccaaaaaaagcaaaaggcaatgggcatattgccactggaggttagaatgagatatacagtcataagaaatggtcaaatgtggatgagcaatgaaacaagggctcggaaatgacgatccaacgtcaatggaccaagatgaaggcaggctgtgcgagaaagggaatatgagaaggctagacatataaaaggtatcttcgggtcgaaatataaacgccgccagattctgaaatgccatgcgcaagaggaaccttggaacagaatgaaaggcagacgcaagacggatatgacgctatgcgagtcggtatgcatggaaatcaaaacgaaactcctctggggtcgtcgggtcgtatcaaggggtcgtatggcaccagtgccggtggtatacccacgcggatttctggcaatctttgctgcagtatttggtgcgacggcaacgccgacatttggcgaactggcgctggaattcttcccacttgccacacttgtaataggcgcattggcggatgccacctctcgcctcatccttacggcagaggtttctcatcaccacgcacgcccagtattgcatgtccttggagtgatgtcgaacagtatacttctccactagggggaagatgttgaaatcctcggaaagaaggtactcgtcttcctcatcacatatatcagggggcgaaggggggcaggagtcgaagtcctcatccaaaagatagagctggtgatcaattttcaacttggggacaagatgggatgactggaagtatgaccggaggttgcagtatttggagacatatgctagtagctgaagagacatcaggacatcctcatcacggggcatggctgtcaagactccttgggctgcgggacgttcccgaaggtacaaagcgtaggagctaggagcgagagtaggagaattaggattgttggtagcttgggtaggagagagaccgagtccgccgttggcctgtgtgttgccgttattaatgatgctgccgtcgacagtcgaacgatgagtgatgttgaaagtctccacctccgggccgccttcagatggatcagtgacggttagatcatgggcgttagagacaccgtctagcatcgttgtgtcccgctcgtcaacactgtcaagttccatcctgttcgggagtccaacaatggtttcagcgggctgtcccatagcactatcgtctcccatggtcgaatcttcgccgtgggcatcatccgattcaccggacgccgactgctgctggcggatcaaaggacgttggcgggcggcaatagtctggggaaggctgcgaggttgtgagtggaggggaccacttggggtggtcggggagtcaggttgtgagacgattccggtctgcagactgggaagcatgctaggaagacgctcggtgtcacgcacaggacgtaatccgaatccatccgtagtatccatagagggaaccgcggtggcaagaggttgcattgaccgcaggcgattgctagcgcgcgggaaccgcccatcgttcaaccggtggttatgggcttcttggccaaatgtactgcgctccgggggagatgtcatagggacacgaggaggagatgtgatatccatggcatcggggtcgttaggttggctgtcttggtagaaaggccgggggatttcgatactcggcggaggggcttgtcgacgcgagtggtgcgactcgacctgcgggtgtgactcggtctggatatctacgtccataggggtggatcgagtggagacgtctcggttgctgctcggccttgactgcctggaagaggactgcttctcggaatcgagatcggtgcgcaatcgcaccttgtctaccaccttgatgtagttgttcagaatgctggcaatgactgggaccatgtcggcttccaccactcttgtcctcacactctcagagccccgtacaccaatgttgacaacacattgaaaggcgaggctccatttccacatttccagtaaatccttgctccgaccttccttgaggatgcataccaatcgctcaatgccgccatcgacggtgaggatatctcgaatccgggcggacgaggttgtgaggtatgcaagatggttgagagagttgatgagcggtaaagtcgatgtgcaatcaagggcacggcggtcatagagggtagtggtgatgttgaccgcggccttgttcacattgggaatactgaaattgacttcccgcatgatgaaagaatgaaaacggagatgtgacgaaagagcgagggatcaaatgtggtatcgatcgatgcaagatgacatccagagatcaaatgcaaaaatatgaggaccttgacggatattgtgtaattcagcccagagagattgatgccgactgcggattaggaactcgcgctgaggggaatcaatccaaagacatcaggtgaatgaagagggcgatgggttcagatttagagaggatgacccaagaagcagaagggggcgaaagggcatccaagactcagactcagagggtgagactttttaaggaacgggaagggcgagaaatgaaagagagaccaaatgcaatatgcaatgagacgatagatgcgtctacgcagtattcgataagatgatgaagattgtcgatggaggggaaggggagagaagaggaaggctttgcgaaggcaaaagcggagagcgtcaggtgcctccttaatattaccaaatatgggttgtacccgacacagaggcatttggcgccaccttgggggatttacccttccctcccttttttcccttgttgttttggtgattcatctgtacttgtacggaacattgtattctttgtttattcgcatttgtctcatttccgatctttgcaatctctctccagtactcgacccttctctgttacattgggtaccgacctcggagttgccactcgaatatcaaaattacatatccttcttcacataccattacatgccataggatcaatcgataactgtcagatcataatacgtacaacgagagacgatcgctgccagattctctaggttatgcctgatacagacggtacaggcggaggctgtagatctcgagcagtgaccatcacaatccaccacccgatgaactatttgaatagcttcggccgtttgtcctgaatagaagaagtttggaccgaaacagatagagcacgtagctgctgtccccataacaactgtgattccacaccacaaatgagttgtgttacatctatatatcggcgacgtcaacggcttcaaatgactagttaaatgactaggtcttaggatcaaagaaataatcgaaatgcttcttgtgcattttacgtcgaagctgtttatgcacatctccaagtatgatatacattccgtcactattgatactacgatatatgatagtccaaatgggattcaaatggctcgtggaacagaatcttgaaaatataccacctggcctggaccctctgacccctgatggctacacctataatgtgtaatattggtggagtctagtatcccataacctttctgatactccctgatgccgtttcatcagccctgaccagggtagtttattttgagaatgtgtttaaacttagcaacaaacaactgacagcgacttgctgaggaccaatcgattacccccgcagatgtgatagcgttggcccccaaggcctccatcacatcttgacagggtttacaggcgcctgcaacaatgtggcgcacagacggcgaactaagattagaacacctgcgaactgccgaagggaatccatgtccgcctgtttgcacctcgaaattttttgggggggggatcaagtttttttcgtttcatcctagggcaaggctttgagaaagacaataatagcggttatatcggttaggggagggatgatacattattataggcccctgcgcaagatcgtcaagcctaccccgccagactagctcagttccattggcgaatttcggatattggattggcttgacaaaattgctagtgtctatggaggttcatttggtactagcgaaggctacttctgcagcctgctttgtgtatactccttacaaagtacattcgtcttcgttctgatcgtcttgtctataaaaggggcagctcggtccatcgtatatggcccctttctcataagaagccaaacttagtcgccggagtatgaggtataaaaggcactcccccagagcatggcaagagatgttcgtgcaaaggattcctggggaatttcaacatccacaagttactaggatacaatgcagcgtccgaatctttgtaatatgtcttccagcatccgttgatatgcaaattgcttattccatagccggcgagtacaactatctttgagacattgtgttattaggccacaggtacacttccgtgtaaggagtcaggtctgggagttgaatctgtgcccgcagccttgtactgacacgacaacgtgctctttggaacctatacactcgtgatacatcgacttccgatcgcctgccacttgagtaaccggagagacgccatatactcagtagatctaatatgcacaatgcacgtgatgttgacattcattattcctcaagaaggagggaatggtcagaacttctctgagataagccgcatcatctcgttcttgaatcagaatgttcagtgcagggattcggatgtgtcttgtgatatgacgtaaactataactggttctgcttgggttctcatccctggagctgagggcgtgggaatggtgacacagatattggcagtctctcgtactcggtttcttttgctttcttccaaggtttgtcataggtgcttactcaccatgttgtatagttttgtatagattgcctaggagtatgagtcaatatatgactgctggaatatcaacggcatacagtgaggtccgtttcagatcacagccaaataatctattagacttcggacatctcgatctcggcgttggcgggtgcctttacagcccgagctgagatgagttcatctctctgatcgagggtttggatcatgactgtacgtacagactaacccatgttagaccgacaggtaatcatggctttctaatggcgtatctgactacgttgtgcctgaaaaggggaaaacaactattgtcgattcgctaagataaaagtggacaagggagagagagagaggaagagggagccgaactatctgatggtgatctgggtccacatgggtgaccgccttccggtcacccaacatcccccctacagatctcatatctcctgttttgaaaatgatgatcttaaaatgtcgtaatcgtggtagtcgtaaaaaaccccaaattttcctttgaattaagtcatcccaataagcttcaagaaagctcggaattgctctttaggaagcgccttcgtaaacccgtccgccgcgttctgctttatatcaacccttaggatatttatatatccttaggccacagcgtcctttataaagaaccatcggagtgccagccatctggtagtagacttacctcccttctttattagtagtaactgtaagttaatattattagtatagataactgtaggatcgggtcttagtaggcttagtaagtctataaccttagtaagccatatagtatcccgggccggctagttaagtgtatactattctactattattatagagttcgctataatcgtctactttttagtagactaagctactaggactcctataaagaattagatatatcctttagttgatttagagtctatctagtctacgtataatacgtctataaatactataaattgtagttcgtccaactttctaaagattagtcctatcttagggttatatctaaggtacttaacgatatatcttattgccttaagattagaaaaagtcggtattactagtctatattataggtatataatagtgaatctaatatctagtcttatcttaatagtaagctagttaagtatccctactactatttagtagtattcgaaattctcgttatcgagtagattagagttaatatcttctaggttagactctctctatcctagtagtagtagtatttcttttatccttatagtatctgtaatatatagaatcttttatatataggcttcttaagatataataatcgtcctagcgttataatctctattaagtatatagttgagatactattttagttctcctaggtcttttatattataatatttcttaagttactttataactaagtctatttctctggaagtaggtatagtaataataaagttattgatatagattattataattattagatctatatagttctttcctatcttaatatagatatacgggttatccttaaagggtctaaagctagtttattaaagcttatagtctatctccttattctaaaggaaggcagagtcttataggctaaaaagagcctagttaagtatatatacctattactttaaatttccttctatatctataaactcgaagcctattaactgtcttatatatactatctctatatcttctcttaatatattaaggtaagctactataaaatccacttaatactatttaaggctatagactacaataagtattaagacaattttaattatcgtttctaatataaccggtatataagactcacttaagttatcgcttttctcctagaagttactatagataacctatcttaccttaaagctatagactttatctcttatatttatcttaatagtaaaacgctattatcctagaaggacttttacctttagtagttttaggattaatatctatattctcttcgcagtaaggttattaagctatttttctattacttccttctatttattctagaaaggtgacttttatatttatttaaaacttaatagtaggttaatatccttattataaagaggttttctgttatagataaaaggtatatctatatctacctaatcggagttatctagagaaagtttctttacatttccttcttaagaagtaatatatttttctgtatacctggtatctctcttttacttcttatattcaatatttaggagtttttatttaggatcctaatatctctctagtaggatactaatatttctcctttttaatctcttagctaaaggttcttaaatttaagttagtactactattaccagttctacagtaggtataataggagtaaccttctcctatatctatatcggttatatagtataccgaggcactttataagtaccctacggtaatatttattatatagtagtttcttataaactacgttctagagtctattaagttagtaaagagaaaggatactagtactctatccttatctattctaggaacagagtatcttcccttagggttaactcttatatagagctggtttccctaattaagtcctattcgattaagtctatatactagtatacttctagtatatctatctcttctacattaattctagctataagttccttaagtcttctctagaaattagctttcctctctgctagcttctctgttattattatttactctatctaagggattatattcttactataaatagcctatatctcttcttaaattagagtaagagtctggttaactctttatactattaactgttctatatttataggaattagtatccctttctaaagtctcttaaggatcgatcttatataccttagtataggaagtaatctctattaataaggtattactagggtctctagtatagttaaaacactaccttaaattataggtaagtaaattattaatagggttactagatcctatctatagactattataatctctatccttagttcagttctagctatattaatcagtaggatagaaatttcgtttatattattatctcctagaggtttcgatagctttagcgctattagtactcttccttcctaatctttatcccctagttaaggaaagctgatatcccttaagattataatcttcctagtttctagattctagatttttagaatatatctattatcccccttataacctataagttatcctttctaagatcttagagtggctttatatacctatactctcttctctttcagaatatagatatagatagttgttccctatagtctaaggtactttagtaacggatctaggttatcgattccaagttctgtatactagtatttaagtagcaatatttaagactttagattggttaatctattaatagtatagattatagtttctactatatagggctatagctccttaggtagcttagtgttaataattattattctctagatatcgttaatatatccgctaaagcgttctactgtaccgttaggctctactatatagggtggtataactttaaaagttattcccttttttataccctaagtaataaagttcttaaattctattctactatcgagtctttatactctggggtagtacctagttcggaatttaatttttttataaaatacttaaagtttaacgaatgctttacctttatttgtaagagtcagtcccttaagatatcttattgcgttattaagaataggtatctagtacttttcactatttaggcccttaggttttataggctatatatctatataaaatttctatactatatcctaaacccgaaattgtggcttataagaaatctgtttcttagatttaccttaaaaataagctttatagttaaagtattctattctatactattctttatcgttaagctcttatacttattttagtattaaagtaagtttagcttttctagtatatctaaggtatcgatacgccttaaaggtagaaattttattaactaatcctatttctttgttactatctgacctataggataaatcttttttatataaattgttttctttaggactaataaggtatagaactctgagtaatatatttataactctaacagtttttctagtactatctgtaagtcgcttagttcttatattatataagatatcctattcttctaggagtttctatatactgaataatttactataacctcttaggctatagtagccttttattaggaaggtatatattattctatcttcgagatctactttaataaggacctctctatatcctttagttaccactctattactagagtagtcctagtaggtatataccgattctaggctatccttctagtatatatagaaatcttcgaagttataggtaagtattttatctaatctagtattaattagctagctgttaaaactatctatataataagctgttactataatagctatattactttgtccctcgctttatagtatgatcgagtaattctatatatataggctatatatctagtatataggtagatcttctaatagataggaatacttttaagctttatatggcctaaaactgtagtaggtatatatcccactcttatctctttatattccttccttcttttccttgatatacttatagatatctttactaggaggtagttagtttcgaagggtcttcttcttcttaggttcgttagatatatttaagttatccttcgaagatttattatcttagcttaaggaggtttcgctattacctcctttactatccctcttatcacctcgtcctctatatcctttactatggttattaccccgttcccttaaggactaggctgtattagtagtcctttctctatcggaaactgcctagaggctcttataatattagtctatctttttgagtatgattttcttaggttcaatattactaatttcctcgataataaattaaaccttagatatttctttatctaattattatagaacttataatagtatataaaaagggtgtggttaaattttgaatcgcaaaagaatgtggtattatttctagtattctataataaattccttcgcagtattaaagtccgctcgttttattttatcgaactttttagttttatttagcgtattttcggccttatcagagccttatactattaatataattttatcgaatattatattagcgaattctaggaggtataagagattctggattcgttcttagagtatattgttaacctaaacgtatagctagctagctactatatataaccagtactcctatctattaaatttcgggttacctacagtagggcgaggtatactgctattaataatatattctagtcttaatagcgcgagagtgaatttcacagggatcgcctatttataaggatttctggaattgtactcgagtgctttaactttctacattttcgcagccgagatatcaggtaggttagtggcctgattcttcttattatatctattacccgataacattgtattagcctggggttgagaggtatttcctatctcccgagacgcgttgttgttacctgatggcaaaaattgtgactgattattcgggttgttatccctagagtcgataccgctatcagccatgctaggagctggtttaccaattctgttattaattgaggcttgcgaggattaaatccgattggcgagaaacgcgcgttatgcgggttaagcgccgggaagtggggtccaggaaagagacttagggttggaggttgctagcggtccttgctagctagagacaagtgctcataacctaatggcgtatctgactacgttgtacctgaaaagggaaaacaactagtgtagattcgctaagatctaaatggacgagggagagggagagaggaagagggagtggaactatctgatgatctgaacccacatgggtgaccgccttccggtcacccaacacatgagcctcattttgtatggttgctggaatttaactacagcccaagttatcaaataggtttatgcgaaatggtcataatgatatctctaaaatacggattgttgtgacgcccccaaacagagacacgacgatgcaataaccactatgtgacatgaaacatttcgaaagttgtttggaaacgcgcagattcttcgctgtgattgacatgtgatcatctgcctcaactgaacgtcccattagcaggcccaaaatacccgacagctggcatcgacttgtatggtacaccctgggcgtcggcagtattcaagtacacgttattcccccaccagtcagggaaagtggcaccagggtacgagatgcaaaagaaaataacaatgccactgagggcaagacctgtatcaagggcagctgccaagatataattgtacttggtccaccaagcaaagaatcggcgtttaataaagtgatacactttctgaccaatggatgttttagaaggttcgggatcccactatactagttcaattgcctgttcgtggtttaatatagatatgtatatatgtatgtaattatggagtaatgtcactgcaaatctccgatgatgagcatctgcatgacagacgccatgtcgaagatcccgagtggagatcttggcaggagaggagcacatggatattcactgacagggacttgcccctgaacatccatggatgtatatagaatgacgaacgtatatccaacggagagcaaacgccgaagactatatcgagccgatcttccccgaaatcgaaatgcaacgtcgcagataatgatcgtccaacagtcagccgaagattcccccgggccggagttaaaaaagaaaaaggggggcaagacagcacaatggattgtttggtggagactgggcagagatgccggcttttggctcggagaaaaaggcccagaataagaatccttaaaagaatcctccaagaatcccaaaagaatccctgaaggaacaatccctgtttaatttatctctttaaattgcgcttaccaatgtcctggaaacggttggacccaccagaacgggagttgaagccgaatggcacgatactctagggctaatatatgtcatatacctagacgcttgctattgcacggagttctccgtgcatatctccatcatatccaataattgtgatatgagttactttaatagccaatagatcaatacggacgtactccgtatttagccacagggccgtgcaccctgaacgaacgctcagtgtgaagcttggacctgcacggagtacggagcaggtcaatattgtttaagcatagattgggagttggggatcgggagaagatcagagataaatatggatatggcagttgcaatcatgcgagaatatcgactcatgtctggaatatagggtcatcttcttcacataaagggtaactgggacataaaaccggaattatacccagaatggacatggaggatagtccaatctccgttagctccataaaaattaccttctatgcaaatggaaaaggggaacgcaacgcaagggagtccatttagctcgtgaagaatgtattggcgtacggtacttgatatgtcctatgatacaggttgttcagagccgccggcggttaaaccgtgacacttggagtaaatcactctttgccgctgttactggctggatttacactgtcttcagtctccgggctagtggtcttagcacccagccgatcctcaacgccacaatttcgcatattctcctgagatcaggagggttcaggagggtttaggagggtttaggagggtttaggaggggtgatatttttttggctttgaaaacttggaacagctaactatgtcagcacaaagtacctacctagttaggtatatgtacgtcagctctagttcgaatatcaaccaaagaaaagaaaccggcatcaggtacccgtaaagcaatatagagtccactgaaagaacttgcagaatggaaatgaggaaactctgaactatacggaaaatatgtactatagtggctcacatatgtcacgatttctttcatgcagtacgggaaaaatacagaaaggtactttggatggcatacaacttgatagcaactgaaagtaccctgcttattcccatgtctcgtattaccactagtaatacgctgacctccctctccttgctcggtctttcaccccctgttcctctctctctttcttctcggtctgttccttttgttcctgttggctctttttccctattctcttattctcgacttttacttaacatattatgatccaagcctaaggccctttcactcggttccgcctttcgactttctctcccctgcttcttcgctccacaccttccattcagccccctctctacccttcccctctgccaatctttccgaccaccattgttattatccggggtacttcgacaaaatggccgatatgagcggcgaacagatgcaggccaagatcactgcggccaggcgcgaagctgagggtttaaaggacaagatcaagcgcagaaaggatgagctggccgatacctcccgtgcgactcccatcacccattgttatgcctaaagggtttcctccccttttcctctcctgggctgtggtccagtacatcgtcctaggagactcgattaaccatactgactttgctctcccgtctagtccgtcaagtcgcgcagaaccagaccgacgccctaccaagaattggaatgaagccccgacgcacgctgaaaggtcatctcgccaagatttatgccatgcactggtccaccgacaggcgccatctcgtttcggcttcgcaggacggaaagctcatcatctgggatgcctacaccacaaacaaggtccatgcgattcccttgcgctcgtcctgggtcatgacctgtgcctacgccccaagcgggaactacgtcgcttgcggtggtctcgacaatatctgttcaatttataacctgtcatcgcgcgaaggcccgacacgagtcgcgcgcgagctttccggacactcgggatatctctcctgctgtcgcttcatcaacgaccgccgcatcattacctcgtccggtgacatgacctgtatgctgtgggatatcgagtctggaaccaaggtcaccgagttcgccgaccacctgggtgacgtgatgtcgatcagcatcaacccgaccaaccagaacatcttcgtttccggtgcatgcgacgctttcgccaagttgtgggatatccgtaccggcaagtccgttcagacatttgccggacacgagtccgacatcaatgccgtccagttcttccccgacggcaacgccttcggtactggttccgacgacacttcctgccgtctgttcgatatccgtgccgaccgcgagcttaatacttaccaggtaattattttactcgagacatttgattgacgaaaactgacttgatattcttccagagcgatcaagttctgtgcggtatcacttccgttgcgttctcagtctccggccgattattgttcgcaggttacgatgatttcgagtgcaaggtacgctgagctttttcccccgcaacacgactagatgctaatctacttaggtatgggatgttctgcgtggcgacaaggtgggttcgctgagcggccacgaaaaccgcgtgagctgcctcggtgtcagcaacgacggcatcagtctgtgcactggatcttgggattcccttgtaagtttccctgcaattgtttatgcacatgcatctactaacctcggatattctctcgtatagctcaaggtctgggcctggtaaaccaaaaaaagcaaaacgctagataccccgtgtcgatcattctgcaatgctcttcttcgaaatattttaggctcgatggttcgaatcaccgccattgtacgataataatcaattaccggggagtcccttgggttcccacgataatacactacccgcggcgcagacatcgtcgcatgcgatacggaaggtgatggaggtggaggtgagcgctatgggatgctgtcccggcgaacaaacgatagcgatgacacaatacttgtttggacatgacgagagcgcgactagtccctgggtcgatggatgtacagtgactgccagcagaagggaatgctggaacgagtcgatccatccgacacctacaccgtcgccctcttctcaattccccttttacttctcgatgacgccctttccccttattttttcttctttgaattctttatcccccattcagtttaccgtttcgttctggtcatctccgcattggtctcgacaattattttgttggcaaaggcaaaaaagaaaaacctggttaccggattctagccaggatgtctctcgccgatctacctctgcgttaccttattattctctcttctcatttctcctttcttctttattctctcctatccccccttatttgtgtctcctctaaagaaagagtccgttgtacttaactgtctttgcgttggaatcttgctctgggattctgtggtgtcggattttgataatggttcaagcagctccaatttccatatgtgaactttttttttcaactcgatcttccatttcattgcactgaaggtggtgatagtagtatcgggaaacgtcggttcatgtctggcttgattctctaatgtgagcctggcgagtatcagacatgtcttgaacctcggtccagcctagggtagaacatgccatccctagatcatcctcgagggagtagtctctaaatagtcggatgggataccgtagcaggtagtacgaccttcggctccacgtatatcaggccacgaacacagccaagagcagtggctaggggaatgccacgcatgtcctcgacctcaatcacaccggtccacattcattgatgcctaacacgcagctcgccgattctgggatcgccttgccccatttctgacatgaaacaagggaatggacgtgtaggagggtcgtaccactgacgctagagagagggactaagacaatagttgtagtagaaaccttttcagaagactaggtcgaaataagaacatggacaggatcagcgttgtggttatccttataataagcatatacgctagaggagagttcatcctttcatatcaaaccagactgggaatacgaagatacgcatccttctagaaaaagaaaagaaaatggaaacatctagacctgaggattcattggtggagacatacagatctacatcgttgaatggggctaccttaaagtagacacttcgtccgtagacacgtcacatagttcgggatattatgaatgcctccacggggaatggagatcggagcatggagtagagctggtttcaaagggataatgaattggaaggctattgagctatcaagctattaagctattaaggtcaagtacgagtatgttagtatagcttgaaccgcttgatatacaacttgggcatacaacacgctataatattgtcgagtccatttatataaatctcgacaaaacattctaaaacaaatgtctttgaccttgacagcctcctagggctcggatgtcctatgtggagcctgaaacacaaaaaaagggggctgttctcaccgtttcatgacttccatggcttctcacgacgatctcttccaacctcagcctcatctccgtttcaacttcaggggcaatcttcgagtatctgcatatcctaatccttgatcctggtccaatccgaaacacaccaaacagtgcccgatcccagatctcccaaattagctcccccctctcacctaaaaacgcctttgcccgctctttcaacatgtccgcccaagaagaattcaaccagctggtgaacaataaccgttcacgcttcacctcccatccagaagaccaggaatcagaaccttacttctccgacgaagaacccgcctcctgcctccgctcccgccaaacagtcgactcctccgacgaggaagccgacgcagacatggtctcctcccgcaccgccaacgcaaactaccacatccccaacaccgtctacgaagccaacacaggacccaagggcgttatcgccgacgcccaggccttcgagcgcgcccgcaagaagtccttccgccgcaccctcctcagcgtcgcggggctcgactccaacagcgcctcctacagctccaagtccacccgcgatgacgtgcccctcgcggccggcgaccagtcctccgccagcgaggacgacgacgaggcccgcttcatgagcaagtggcgccagtcgcgcatgcacgagctgcagggccggaataatcgccgtgccagtccgcgcggtagacgctatggatcggtcgagacggttgatgccgcggggtacctcgatgctattgagaaggtgacgcctgacacggtggttgttgtgtgtatttatgatcaggaggtatgtgtgggatttggatattggatacaattgggagctaatttgttatgttatagttcgatgacagcgctattgtcgaggagtgtctggtcactatcgctcgcagacaacccactacccgcttcgtcaagatgcatcacgatatcgccgagatggatcacatcaaggcccctgctctgctggcctaccgtggtggtgatgtctttgctactattgtcgatgtcttgcgcaacattcctcgcggccgcagctgtagtgctgacagccttgaggacttgttgaagctgtgcgtattcccaggctcttgttcatttcgtactgagacatatgctaattctcgattacaggcaccgtgtgctatgatactttctttgctattatgttttcagtccgtccacatttatggcatagtagcaaggcgtcttggttgttccctcgtgatctcctctgcatgatttgatttgatttgatttgacctgacctgacctgacttgacttgaattgtctttcctttccttcccctttctttccctctcaaacactctctcccacctctctctttatgtcccatccctctgatgttggatgcactacctgcaataaaaaacccaagaacagatcttcttgaaacggcgttggtcactagaacaaagtgtacacgtttggactcggcaggtcgatggtctggctactatcttgccgtgtcatgttagacacgttgcgtttctcttccctccttgtctgattatgtccctactatttccagcccggccggagccgggcttgatgttgatttacacgagatatcccatgctgttattactgttcctgctctatcttctctctcgctggtaatccccttagactgagccctaaatatgtaaactagggttccgtatggtcatctgctacacccagtaaccgagaaggaacaaaaggcaagaacgaagggccgtccatgatgggaaggcacgtgggtttgggggaaggtataaaatggcccctcccccatttctcttcttccctcctcctctccatctctctgaccaccatctcaccgtagcctctacgagacagcgtcgacagaggatgatgtagcacatgctgcttcacctaccacagggatcataacattactatatttgttatgaggtccatgtaggtctgcatcagataacaaactgggctttctcgtggatgttcctgaagtcgtggctctcattgccacttgacgagtcccacggaatacatgaggggtgtaaatctccgtagccgaagacttgtacatatagatggtcacctagttgggtagtcacagtacactttcacatatagctctaagtctaggcttgcgtcatgggtctgacttatatgtgaattggaagattccattccaggaagtcccacagttctatgtgcaagatatcaagggtcacatctccagagatccaggcaaagagatatgaaagacagccccaagtgaaacaagcttgaatattggtataagacccatattatccagtgcaaagcatcgtaaggaaccatttacgtggttctcgaattccaagtctccctctcaagcaagagatgagtgaaatgtaccacgctcatatcccaccattccaccatccccgagaccacgagaaaagaatacgcgcatttcataagagaagcgcgagagcaaaaaaagaagaaagagccatccaatttccttcggtagtccgctaactccccgtgtcaaaagacagaaaaataaatgagaaagtaactagacgcatggccgtggtgaccaaggatacatagcaggtagagaaagaagcgaagactcaagaaatgagaagaaaatagaataaacactcccacgcctggtttctctcccctcttccgctcagtcggttgtctcttacagggctccgcggtccgccgtgaaatcccagagcattttgatcaacgcgtccgggagcgtgtacagatccacgtggaactctccgactgtagaaacgaaaggagaaggttagcgtgttgttcagagtaaatttcaaggaagcagagaaagaatacggagtttcccttccctgacacacagaggaacttacgctcaacatcgttctttgtgtatgagtccgccgccttgtggtcatgaaccatctgcacgacctgcaagaggtcatcttcgttcagcttctgaagcccatcggcaagcttgtccatgtcaaccttgagagggtgtcagtcctgcagcgccaacctcagacccatctcatagaaccaactcacattcttatctgtgcgcttcttcttcttggcgctctcctcgccaccagcagggcgcttgtgcttgataccattctcatcaccggggaccggaccggactcgcgcagcgcagccatcaaagcaggcttggggttcttgaaggtctgcaccacaaaacgcaccgttgatcagcacaccatactttcgctatcaggggaaattcaacaaactcacaagcacatgcttagattcataacgggtctgggcgaagttcaggtcatgttgaatcgtgtacgacttgtcagcagtgagctcgatcgacatatcgaattcaccccatccctcctcctgaatacggaacggcgggtgcttgaaaactatttgaagtggacaaatcgtcccacgttagcctctaatcggaaaacaacacacacacaccccccgcaaccttgatcgcgcggccgtgggagtctgggtcgccagataacccaaaaatcaaaaacacaatagggaccaaacataccctgcgtggcacgttcaccgaaactggggtgcaggtggtaggtgaccttgtcgaagatgttcgcggggaccaaggcgcccttctcgttcacgagccagacctcaatatgccatgatcgctgtggaaaaccctcaacctccgagggcttatctctgtagtgtaggaagaaatcccaagtcagccaatgtggtctaatcccgcgcgttttgtgtgcatgtgtagagatgggcgtgggggtttgaaggaaagagtggtggtttgcaaagcgcgcctctccctataatccttgtgcgcattatcatctttgtgtcctgtaagctacaggacggacgtgacgatagcgttgacagggtattgtgggaggagacagtagctttcagaccggggtttgcgaagggagggaaggcggagataggtagaggggcgcatacataatgttctgctcggtgatgagacggacagtgcgcttgacctgttgagaaggagtgttagtgtatgcaagcttaattgtgctaagaatggagaagacaccaggtttgggcttgtcggctctagcgacaaacccacagtccaaggccgtagatgcaagtttgcggcagttgatgagagggttagatactcacgtcaggcatgattattttattggcgacttcgggtcgtcacttgagagaatcgtgaggttctaaggttttgaggccgaaaggggacgttggcgtgcggagaggtgggcgtctcggagacaagtttgcgcggttgtctatcggagtgagcaatgagcgtaggatatcataactaggcaatacctcaatgtaaccaggcagtaaggtgtatgtagtgaggttggtctattgatatattctcaaggcagttgataaagcggtgaattaaccttggaagctcaaggaggtttgagaatatctccaggcctatgtttcatctgacgctctctcactttctgatgagttacgcgtttaatctaaatcgtcttgagactatttggatcaaatggatatggctataaacaaatttactagacttatagcccgagcattgttccagcaaagtgcaagcaaaatctaatctttcggttttaaaaatgtactattttgtattattgcatgcgtttgcttgttaggcatactcatcattacttttgtttgtctttgttctttttcttcagatatcttcagggtatggggtgatgtgcaggtatattggatggggaaatgtctatctacttcccggagaaccatcgacgttaggaactgccctccatttcgtagactgcatggctcgcaatagctatccgaggagcatcttcataactgctgcctcgctcgtcgcgtcgtatgggatggggtgggaatgggatgtattggggatgattgggtggaacggtgtgaaaggggcgaaattgggtaatttttcaagagcaagctccgggacggcgtacccaaatgccttggaacggcaagtgcaccataattgggtatgctcgatcctcgaagagtcagcaatacgagagaaaaggagttgtttactcttcggcgttgaagagcttctcgttctccacctgggcggtctcgaaagcatccttgaaggcgttggcgtctatacccatggttagcgaatgcttgaataaagttgggataaaaaaacttactctcgctgttagcgaaacggatggccagggtctgagcctcaggctcaccctcagagacatcggcggcggcgttccagacccagctgcggtcactgccgacgttggcgctcaacttcatgtcgggcacgactggaagatacatattagcacgagatcgtctttgggaaatacgagccgtgggggatctcactgtagtggttggcgcagaccttaagggtcttatcgcggcgcatgactaggcgggtcttctggttctccttgtgcttcaacagacggacgtcgccggtaccacgctccttccactccttagaatcgcggtcgaacttgaacagcttggcgcgcatcttgaaggtctgctcctcaagctcctcgttggtcttagtctcaaccttctcggtcaagcgaatcacgggctcgaagtggacatcgacggactcctcaacttcatcctgaatcaaagaatcatagtcagtatatgcgcggagctaaaatagtcattgacactagcatagtatggcttggttgcgacgaccccactatcgggtgacaggggcacaagaccccgctcccatcgcggacacgtccaacaacaaccgcctatgccaacagcatcagatgtataaaactcacctcatcgttggccttctgggccttggaagagccggagggctcatcagtaggctcctcggcctcctccttcttctccttcttggggccaccaccgaacatggagaacatgctgtcggaggtcttcacggtggcatccttagcagtgtcggcagccttctctgcggtagtagcgacagtctccgcaacggtctcagtggtagacttctcaccctcgccagtggcggtggtggtctgctcagtggtctcggaggcagagatggcggggtcgggcttagtctcggtgatgtcagacatgttgacgaggggttcaagagaatcggtttgaaaggatagaaagagagatggcagatttccccgggaggtaaagtggaatttcagtaacagataatgtttgttgatcagagaaagcggcgatgagggggaaaaaattaatacttagtttgggtcccatacctggcagaacccgccaccgcttttgtctgccaatagtgtactctatataggtgtgaactacatgcaacgtggggaaacacacatcaaagagaaaacaagtgaacattctcaaggccaaagtgggattacggtttaaataagagataccattgcgccgactgaatagttcgcatgaaaacccatttccagtacagttgccacccaccaaacctgatcgccataaacaaaaaccagtcctcaaccaactcattaataggaaaaagaagcaaatacaaagtcgtaaataagctcgttcatcatttcgagccaagggttgagcaatccttggatttgccggaccggaatcccataacatgtcgcgcacgcgactgagctcgatccagcgcatcacatttcctgacgttacgcactcgatccatcatgctgcgaaggtcaaacttcggcgctgacttcccaattcgggcccatgcttccttaacaaggcccttggcttccttgtccacgcggctagaccgcatttgcaacacagaagcagcacttcggaatcgctggatagtattgcgagtgaggacgtctgagatctgcttcgaacgtgataaaacggcatcgcgtgcatttagactctcacggcgtagctcctcggcatcacggcgcaagagatgggttctctgcaccacatctcccacgatcacctgcagatcggtggagaggcggccgtatacctcagtcaggccggtctgagccgtatggatttccttggcgaattgtgaagaaattccctgtgctgcacgcttccagtttgcgatcttcagccatggggttccgaagtcaacagtcatggtctggctgattggctgccttgacttggttgtaattgtcaagttgactaacccgtacgcatcctcacggttcaacttcagtgtgtatactccatcgaacagctgtgacaactcgtatgtaagagccttgttctctctatgaacacttacattgaattgtggctgcttcttggacgatgcaaacttatatgggggcttgatgataacatggcagtctccaataacctgaatctcaaattcgttcgtcattcccgatgatttctcagtagaaatagttggcacagagacatcatcggggattatagcccctgagggcacatgcaatgcttgcatagaagctgacggccgtgttgagattgaggtttgtaccactcgatccagggtcagaacagaagtggaagagacattggaagtcactgggaaggatgcattggatagagctgatccggcaaagcattgcgctagaaagacgaccagcactctaacagccgcatacccaatagagatggcaatggccgaaatgagagtcaaggtaaccagacgcagcgtgggggccaggtctcgggcccgcgtggcataggaatgtgggagccaattaccaggatacttctcaagatccgtaaatatgtggctttgaggaggcttgggagtatcggcagtggctttctgtgtctttctcggatacaggccaacaagagaagccaggtttcgattcaattgaccaggtgtgatgctctcgaaagtcttcaaatcgataggataccgtcgaaggactgcggtctcaccggaaactggatggcgggactccaaacatgtgtgaagactgttgtggttaagagggatcatctcgccggccatcttccacagtggctcctccgaaatcaccattgccgggactccatgacgttctaggaacatatgggcaagacgctgggtcttgaccgccgctgcatcgtcgaggccggagacaaagagaattgctacatctggtagagtccaatctgttgcagacgttatatggtagtcggaaccattccaggccgaagtgcaaaccggacgattcttgaacttcaggttcagtgtattaggtcggtccgcgtggggatcggccgtggcttccaaacattcgtcaaccaccagctggacatgaatcggaagaagttccgcgaaattcggaacagctccggcgccaaatgaggttggcacgacatgatatcgagaagattcagccgagttggtctctgaaccagcacatgagcttgagacaagcacatcgccgatcttgtcgagaataatatttcggaatcccggttgtccgacatagagcacgcggaagggtttgtccaggtcgagactctgtttcgtcatggtctgttgaagcgtggccatgaggatggagtcggttgaattgtaaggcagccggctcttcaattccaaggctgcagcaccttcaaagatgcggatagtatgcttgagctccactctctcgatctcgggccacttctcgggctccacgaattcgatcgaatcactggcatgggggaaggagggcttagtggttgtggtgctgtcatcgatggtacttcgtctggcagcaaagagggcaggcagctcctgggaggccgattcagtgcactgcacttcatccctgtctattccatcatcctcttggtggtcttcatcctgggcctcggcctcgctctcactgtagcgttcatcgaggcttgcaacgtcgtcagggctagcctggtcgatcaacgagcctgtatcggtttgttcggagtggctgccatcctctgaacgtatgtccgacacactcagagtcgcccagctatcactcagcgttttgggtgaatggtcagaaagttgatctgacgtcatgttggtgggccgtgaacgtgataaccactcctcgacagaagctgtcaggggtggaagagtcggatattgcagattcgaggcagtctgggcacggtggaaacgcctgtgaggcgagtctggatcgtcagtcatttcgccgatgtaaacttcatatagcacacgggtgcggcggaaacaggagcttagggatagcccaagcggtaggaagaaggtcaagaaaagcagagttagaaaccgagacggagatttagagcagggtaatagaaaagaaaagggaagatcggaagatactgggagtgctaggcagagactcagagagcccaaatagagtgataaggtgggtctgcggggagccggatgtcaggatgggtcaggtgcgtgtctgacttaaggaagtaagggcttacctaggtgaaggtgtgaaagcgacaaaggccaaagagaaaagaagcaccgtgaagatcaagaagtataaaggagaactgaaacgtagagcgttgacgaagggggggagttgtgttgcgataagagaatactagaatggatgacccaagtgacagtaatagtgggggagtacaaggtacctagcagttgtatgatggtgtcacccatgacagaagtactgggtacaagtcactttgctacctaacggcaactctctttgtctgcccctcgcaatgcagatgcactccaaggtactccaatatactccaaacgagagaaagtactaacttactaaacctatcatctctctttctttctttctacctattcttatacttctctatacttgataacgaatagctccactgtgccccaccatgaacactaaaaacatgaactacacggaaatgaaccgcgactggaaaaagacagtctagattgatctagttcacttgcatctgagaaatccaactctctgagagtagtgtcatcttcaccttgctcatcggcgtatgacccgaacaaccctgcacgtgggatctaaatattgaggatggcaatttgtacatgctgatactcatgtgtggtcttttcgacaagtaatgtcaagtgtataagcttcactaggagaacaaggaaagaaaataagagattatagattgaagctaagcgaccgggaaagctctagatgtaataggattccttgactacactgaagtttgaccggagccctcatatattttatatttctcactgtgcgcactatatgcctgattttatgcatatatccaagaatgacgtgcgcctttgatccctattcagaaactttcggctcgtataatgccccaacacagcagaactcctgacagcgcatgtagataccaataagcctcgatccactcggggccacgtatactcggtcatcccacagccttaggtagttgtcagcagacgccgcatccttgcaccccattttcagtcaggtataatgaatgatacgggccatttcatggtgcaggtcagcggaaagcctaagcttctcgtaacgaggctgctcattccgttcaacctcgaactcgattcccatgagcttgtgctctgtggctgcaaccgacaagccaagaatccgagcatctggtgcgaaatgaacggcttgacgagtctcggtatcggggtcacttgtgctcgctgtcttacctaacgtgtagacgaagactagtccgactattgcctggtctttgaagtaggtctcggctgtgattatagtctctctacagtcctcatcattctgcctctcaaactagtgtttccgtacctggtcaaaaggaggtacttgttcggggaccaatatgagggcttttgggcgacttctattcgtaaagatgacagctcggacgcgttcagaggatgggttcaatatccaagagatagctgtgagtcggattcaccctgatactggtggcgttgcagcgcttgggatgacatggactggaagtccggagggcggaacgtcacactgcgagaacttgtcgtctcgatgtgtatagctgcgactttacctatttccaaccccagaagaagcctactggaacgagccagatagtcaagttcaaacccatcatcgagttggtgaatccattgtcctacggtgccaggacttgaatggttataatactcgagcttcaaaccggacatgcgacttcgagatctggattgaccttgtatgcccgtagatgcatgaattttccggacgttcttgagtgacgaataggtctgatagtcatcggaatttctactgtatatgaaatgagtgagtagagacctcgtacttctgcataccaaggtcaaatgcgagagtgtgaagacgctggatcatcatcactgtaggggtcgggcagcgaaataactccgcagagagggcagtaaacattgggaatcggaatcatcgagatatgggccatacgtttcatatccttgctttgaaatgcacaatcccctaatctcactagtgagtattcaaacggtagaacatgtaacaaatatcttacatggagagctgtagaaatctatagacaggcagtccaaaggatgggtaggatttaggcatacaacctatggatggccgggatccggataattgagtatctccggcctatggcttcagaaaggctcctagccttcagacctgttcaaatgtactccgtgctagtagatagctagtagatggaatcatgattaggcttcaagaaggtggtgagttaatcaacgaaaccacttgacaaggacaccaggtcctaaacagagatcttctccaagcgcccggacaagccgaacagttgatgaaaaggagttcgcatcgatcgggggtagtgtaagcccaatgacactgtgcaacgaggcatatgcaagcatagaggccaagtcgcgaggtccaaatattggaataatcatgacgttctgcaatgcagaactaccagcgattaaactggcaagaacagatactacacttgatctaagccagaggcaaagagagctgaagaagaaagaaaagagaaggaagttctgggggcagggccaccttcttatagtcatcctaagagcggtcggcttctgccactattcacaaatgagacaaacaacgacatatgctcgcttaagaaatggtaacgtgatgatgagaacaggaacggtgtctcttatttccggtttctttgatgcgaggccatcatgtttgtttcttctgatatcagcacgagaagggctactgatacaatcacacgctaaacttgtttaggtatgtctgccgctggccgcgattctatatccaataagagtatactaaataatttcccttccttccatagatattggtacattcaattgtattacttgaaactgtgagtagcacagctggtaaaaacgactcttctatttagaatttaaatgtccaaaacatagtaaaaccgaagaagtaaagtgcattatactgatatcattcttcacgtaattgaccgagtgattattccatactctatagacaaccatgcttgatctggtatttgcgagggtcaagggtgggcaatgcgagaaaacaacccgtggatgtatgccacggattcaaggatgggtggggagagaggaaaggtatgtacatttcatgaatgcatgctggaagacaaaccacaaaaactgtcacacggggatggggatgggaaggggggaaagctgctgagaaaagaagtggccgatggggaggcaaaagaaatatggcacagagacgtggcgggagttgcttggggcgttgctcccagcctccgaatcaatggtctcctaccaccgagatgaaggtgtgctcctggtagaacataggatatagtgatgaaatctggagaaaacattggatataatggttgtcgagaccacatggtacagtaccaatgttccactgccgatgacacacaatttcttccaaatagaaccaagggatgaatcacaacagccaaacccagtggcacagcatgcttgatgaatgtgacaacagtgatgatggaaatggtaacaccatcttccgataataaaaaagttcagatccgttgaacgccgcctaggaaggaaaccctatgaccaacataagatgcaggctccagctggaaactctcgagggcggacccaagggatgcatgcagccgaataaatagacaggggagaaggagacgcagaaagacgtggcaagcactgagcactacggcaccagcatcaagatctatggcgaggcccagccaccagccacgtccacccattcgttgagacagctgccttgcttgccctcaacatcgacaatgtcagtgtcgcagcggcatcggcaaccgacaccattctccttgacttggtcagggttagcccagtattcgtcttcctcgatccgtttcttctcgtcatcggtagtcttttcgaggtaagggatacgggtgagttggcgggccggagcgttggccgggcaatgctgaatggtagtgtggcggtagccaaagtcacggaagtaatgaatatcactaggcgcgaggagagcacctgcggcgagagagtgaataggagcatcgccccactagtacagtcagtaaagatcccctggcacagtacaaagacataatataacatacccgctcattccaaaatcctccactttggtccatcatggtgaagaagtcctcatactccttgctgcggaaccaatccaggcgggcaatctcgaagttgctccagaaatggcacatgttgtagctctcgccttccatggcctctgggtctacgtccttcagattgttgtcaccggggtctgtctgcaggatttcatctggcagtttgtcctgcttgttctcttcgggagtttccggttgctctggttgctctggctgctctaggaacatttcccacagacccttggacttgaggttgttcttgcgcttgtaagcggccgcataccggaagatgttggggacagtctcgcgaagctctttcactgcaattgtaaagccataggtcttgtttgcctcggccatcttcaggaatggatcactaaaggtatcaagtcagcagattgactagaaaaatacgccggagtaggtatcttactaggtgatgtcgcagaagtacttgatctcgggctccaaacgccagtaccactcatacttcatcagcagagggtgcttgtagaagtgtctatcgcaaagttagctttataatccaagtccaaatctgccattgaagactgaccctgagtagaatcggcacatgtggtgatagctttccattccaccgtacatgatggcagcgtcaccctgcttcttgatgccctctttggcaacctcatggtcaacccaatcagggaatccccacatgctgttgtcaatcttgccgaattcgacttctgcgctggtgtagttcttgacggttgccttgaactcctcatcgaagtcaccatcgttgaggaaaacataggggtagtgccaccaccggttgaagtgtctctcgattgacttgagcgactggatcacgccctccaactccttatttctggcaaggacgacgaaggcggcattggcgcggggagcctttgcgatttgatcgggctcaataggcatacagcccgtagcaaagactttatcatatttttcgctgatttttctgtagaacgcgggaggttagttatcgcaccaaggagcaccaattgacagggcgatacgaaccggatagatggcggagtgcccgctggaattaggatccccccgggagaggcaggatgtcggacaaagaggagcagaataaggacaattacaaggcatggaaatagtaaaacaagacccaggggtatagaaatagatgagttgccctttaggcgaatccgccttcggaaaaaggcgaatctaggatggaggtggcccttctcggttggaacatcctccaacggcagactcggcgcgctgggcagccgtttcgtgatgcgttggatgaagctcatgagtgcgattattgtgagaccacacggatgattgtagcggtcagctgtcaggcccgggcgacagcacggggccgttagggagatagcggagatattgtgtcgggggtgtaatcagaggaggactgcgtcttgaggagaaaaaagttgagcacacgatcagaccgaattcggaccgtatggatcacagggaaatccgaaagtcaaaagatctcgagaaaaatggagaaaatgacagcaaaacgagtggccggaggaatgcctcctttcgtcccccaactttctcagtcccacggtaaatagatggggaaggcgttgggagaaacgcgggcaactgtgaacagcaaggtacacagaggagagatcggggacatcaaaacaggatgagggtgatggggggagagaagatggggaattggaagacgggatgggtcctaaagggctgcttgcgcctccctggtcttggcgaagtccggtggcctcttgtcaccctgagacggttattttacccctggttactgtgaagtggcgttctacctggtatggtatggtatgtatggtatttcgtggtatttcaggtgatcttctactttttgtgcgatgtacggagtattcttatattgaacctcatgtttctagcatattccctatatttgactcttgagtggatttgatgctgtttatttaccggattcaggattggcctcttatactaaggggcaaggtggttcagacggtagtacataccactcgtattagcccctaagctaacgaggaaagcttttgtgcaatcattttgatcccatctgcgaagactatgcttgtgctcgtgtgctttctatgttgtacaaactcttgtacctgaatgaaaaaaaatccgatggtgcagcttattgtatgtagtccacttgatccaccaatgcttagccctacaaggcgacacatagaatatgcgaaggcaatgactacgggtatggatacttgcctctggaatgtatcagttggcttaaatggtcttacacatccttccaagatttacccggataacctccaactcggagccctgggacgacctgtttcacatcacatgcttctatgtagatacaactcgttgaattagcgcatgacgatcgagggtccaaactttcgcaggccgttagacccgaaaatagcagcaatgattattgtgggcatttgaccctgtcatctgccattcagtctcttttatatgtggcaattattgagttggttaagtatcaagtacatgatatctcatgataacaggggtctttatgcaagtactagatacattatattatcctgccaatctcactacacgcatatgtgaggcaaatacggtattgtactgtatgtaatgcaaatttcattatccctacgggtctcctccgaggtctggaccgggttatctttcttaatttgcacgaacaaattgcaaaggagcggattacggagtatgttattgtgatatcttatggagtacatgttacagagtacgtcttttggctttttcccctatatcaccgacctacatttatagtagctacataggtacggagtacatacggagtacatgtacatatgtcggtagactacgtagtacgtatacatatttgttttgctcgtgtgcatcgaagaaattactcgaaggaaacagaattccaacagaatatatttagtttagcacactaaaatacaccactttcatatcaaagttatataatttcccatgcacactgtagatcccaacttgcttgccgggaagccaaaggaccaaaaggcttggttccggatcccggtcatccccccatcaccacactccgcatgacaataaactatatggagtcaccaccgtggggtgcccccttttttcatttcttcctttctacatcacaacatgactgcagtggtgaccaggcccttgtctgagggcaaaaccgcgatgatcaaacctccggaacccggcccctcgtcccatttccacaacaatgggaatttggatcccttttcgccagtcaacgagaatggaagcttcgaattcgatcgagtcttgaa
